(19) United States
(12) Patent Application Publication
(10) Pub. No.: US 2024/0101645 A1
(43) Pub. Date: Mar. 28, 2024

(54) MONOCLONAL ANTIBODIES AGAINST CORONAVIRUSES AND USES THEREOF

(71) Applicants: THE HENRY M. JACKSON FOUNDATION FOR THE ADVANCEMENT OF MILITARY MEDICINE, INC., Bethesda, MD (US); THE GOVERNMENT OF THE UNITED STATES, AS REPRESENTED BY THE SECRETARY OF THE ARMY, Fort Detrick, MD (US)

(72) Inventors: Shelly KREBS, Silver Spring, MD (US); Kayvon MODJARRAD, Silver Spring, MD (US); Nelson MICHAEL, Silver Spring, MD (US); Vincent DUSSUPT, Silver Spring, MD (US); Gina C. DONOFRIO, Silver Spring, MD (US); Samantha TOWNSLEY, Silver Spring, MD (US)

(21) Appl. No.: 18/273,309

(22) PCT Filed: Jan. 24, 2022
(86) PCT No.: PCT/US2022/013565

§ 371 Date: Jul. 20, 2023

Related U.S. Application Data
(60) Provisional application No. 63/140,763, filed on Jan. 22, 2021.
(60) Provisional application No. 63/194,095, filed on May 27, 2021.

(51) Int. Cl. C07K 16/10; A61P 37/04

(52) U.S. Cl. CPC C07K 16/1003; A61P 37/04; A61K 2039/505

(57) ABSTRACT

The present disclosure is directed to monoclonal antibodies, or antigen-binding fragments thereof, that bind to coronavirus spike proteins, including the spike protein of SARS-CoV-2. These antibodies demonstrate high affinity binding to epitopes on the coronavirus spike protein and/or broad cross-reactivity to the spike protein of various coronaviruses. Compositions comprising the anti-coronavirus antibodies, nucleic acids encoding for the antibodies, recombinant expression vectors, and host cells are also disclosed. The present disclosure is also directed to methods of diagnosing, preventing or treating coronavirus infections, including infections or disease caused by SARS-CoV-2.

### CROSS-REFERENCE TO RELATED APPLICATIONS

[0001] This application claims the benefit of, and relies on the filing date of, U.S. provisional patent application No. 63/194,095, filed 27 May 2021 and U.S. provisional patent application No. 63/140,763 filed 22 Jan. 2021, the entire contents of each of which are incorporated herein by reference.

### GOVERNMENT INTEREST

[0002] This invention was made with government support under W81XWH-18-2-0040 awarded by United States Army Medical Research and Materiel Command. The government has certain rights in the invention.

### SEQUENCE LISTING

[0003] This application contains a Sequence Listing which has been submitted electronically in ASCII format and is hereby incorporated by reference in its entirety. Said ASCII copy, created on 24 Jan. 2022, is named HMJ-174-PCT_SL.txt and is 608 kilobytes in size.

### FIELD

[0004] This application relates generally to antibodies against coronaviruses and methods of using the same to detect, prevent, or treat coronavirus infections.

### BACKGROUND

[0005] Coronaviruses (CoVs) refer to a family of enveloped, positive-sense, single-stranded, and highly diverse RNA viruses with four genera (alpha, beta, gamma, and delta). Among these genera, the α-coronavirus and β-coronavirus are capable of crossing animal-human barriers. The coronaviruses infecting humans (hCoVs) include the beta-genera CoVs, namely Severe Acute Respiratory Syndrome (SARS)-CoV-1, SARS-CoV-2, Middle East Respiratory Syndrome (MERS)-CoV (MERS-CoV), hCoV-HKU1, and hCoV-OC43 and the α-genera CoVs, hCoV-NL63 and hCoV-229E.

[0006] SARS-CoV-1 first emerged in Foshan, China in November 2002 and was subsequently transported to Hong Kong in February 2003, from where it spread globally. The epidemic was contained in July 2003 as the transmission chain of SARS-CoV-1 in Taiwan was interrupted. While there were four instances of SARS-CoV-1 reemergence that occurred chronologically in Singapore, Taipei, Guangdong and Beijing, SARS-CoV-1 infected human cases have not been reported since May 2004. However, in April 2012, MERS-CoV subsequently emerged in Jordan. Since it first emerged, MERS-CoV has been causing persistent endemics in countries within and outside the Middle East.

[0007] While the population continues to be threatened by MERS-CoV, SARS-CoV-2 has recently emerged and led to a global health crisis. On 30 Jan. 2020, the World Health Organization (WHO) declared SARS-CoV-2 to be a public health emergency of international concern and a pandemic on 11 Mar. 2020. SARS-CoV-2 first occurred in Wuhan, China in December 2019, after which it swiftly spread across China and as of January 2021 continues to aggressively infect people globally. New variants of SARS-CoV-2 have also emerged due to mutations in the viral genome, including new variants recently reported in Great Britain, South Africa, Brazil, and the United States.

[0008] While hCoV-HKU1, hCoV-OC43, hCoV-NL63 and hCoV-229E mainly cause asymptomatic or mild respiratory and gastrointestinal infections and account for approximately 5-30% of common colds, the effects of other hCoVs including SARS-CoV-1, MERS-CoV and SARS-CoV-2 can be more severe. For example, while symptoms of COVID-19 caused by SARS-CoV-2 are mostly mild, such as fever, coughing, and breathlessness, older adults and those with chronic diseases may experience severe symptoms, including severe pneumonia and organ dysfunction. As of 20 Jan. 2021, SARS-CoV-2 has infected more than 97,230,986 people worldwide, contributing to more than 2,080,350 deaths, with a mortality rate of 2.14%.

[0009] While vaccines are presently available against SARS-CoV-2, no therapeutics or vaccines have been approved for treating or preventing infections caused by other coronaviruses. Further, the approved SARS-CoV-2 vaccines may not be effective against all SARS-CoV-2 variants. Accordingly, there remains a need in the art for therapeutics, diagnostics, and vaccines that may be used to treat, diagnose, or prevent current and future coronavirus infections, including infections caused by SARS-CoV-2.

### SUMMARY

[0010] The present disclosure is directed to newly discovered human monoclonal antibodies, or antigen-binding fragments thereof, that bind to the spike protein of various coronaviruses, including one or more of SARS-CoV-1, SARS-CoV-2, Middle East Respiratory Syndrome (MERS)-CoV (MERS-CoV), hCoV-HKU1, hCoV-OC43, hCoV-NL63 and/or hCoV-229E.

[0011] The human antibodies are described, in part, by the amino acid sequence of their heavy and light chain variable regions, as well as the amino acid sequences of their complementarity determining regions (CDRs) and are referred to by the following designations: COV_1007, COV_1037, COV_1045, COV_1046, COV_1201, COV_2004, COV_2008, COV_2014, COV_2018, COV_2024, COV_2025, COV_2027, COV_2028, COV_2035, COV_2037, COV_2038, COV_2039, COV_2054, COV_2056, COV_2057, COV_2063, COV_2091, COV_2100, COV_2103, COV_2108, COV_2123, COV_2125, COV_2134, COV_2151, COV_2165, COV_2172, COV_2173, COV_2193, COV_2196, COV_3000, COV_3005, COV_3013, COV_3019, COV_3028, COV_3031, COV_3033, COV_3037, COV_3040, COV_3043, COV_3053, COV_3088, COV_1012, COV_1025, COV_1032, COV_1050, COV_1056, COV_1060, COV_1063, COV_1071, COV_1076, COV_1082, COV_1085, COV_1086, COV_1087, COV_1097, COV_1116, COV_1118, COV_1122, COV_1131, COV_1136, COV_1144, COV_1145, COV_1149, COV_1151, COV_1154, COV_1165, COV_1166, COV_1170, COV_1172, COV_1177, COV_1184, COV_1198, COV_2032, COV_2048, COV_2055, COV_2056, COV_2064, COV_2066, COV_2077, COV_2093, COV_2137, COV_2143, COV_2169, COV_2172, COV_2174, COV_2205, COV_2215, COV_3049, COV_3069, COV_3077, COV_3079, COV_3100, COV_3103, COV_3129, or COV_3137 antibody. These antibodies are also described by their functional properties, including one or more of:
[0012] (a) high affinity binding to the coronavirus spike protein, as measured, for example, by dissociation constant (K_{D}), such as a K_{D} less than 25 μM and optionally a K_{D} less than 15 pM, 10 pM, 5 pM, 2 pM, or 1 μM;
[0013] (b) cross-reactivity among different coronaviruses, including one or more of SARS-CoV-1, SARS-CoV-2, Middle East Respiratory Syndrome (MERS)-CoV (MERS-CoV), hCoV-HKU1, hCoV-OC43, hCoV-NL63 and/or hCoV-229E;
[0014] (c) ability to bind one or more epitopes in the coronavirus spike protein, including the receptor-binding domain of the S1 subunit, the N-terminal domain of the S1 subunit or the S2 subunit;
[0015] (d) ability to block coronavirus, including SARS-CoV-2, interaction with cellular receptors allowing these antibodies, individually or in combination, to be useful in methods for preventing infection or decreasing disease severity as described herein; and
[0016] (e) ability to neutralize coronavirus variants, including one or more of the circulating SARS-CoV-2 variants: B.1.1.7, B.1427/429, B 1.351, P.1, B.1.526a, and B.1,526b.

[0017] The broad cross-reactivity of some of the human antibodies disclosed herein, suggests that they recognize a conserved region of the coronavirus spike protein and, therefore, can be effectively used against coronavirus variants, such as existing SARS-CoV-2 variants, that have emerged due to natural mutations in the viral genome, as well as new variants that may emerge in the future.

[0018] Compositions comprising the anti-coronavirus antibodies and antigen-binding fragments thereof of the disclosure, nucleic acids encoding for the antibodies, recombinant expression vectors, host cells, and immunogenic compositions comprising an amino acid sequence to which the instant anti-coronavirus antibodies bind are also disclosed. The present disclosure is also directed to methods of diagnosing, preventing or treating coronavirus infections, including infections and disease caused by SARS-CoV-2, such as COVID-19.

### BRIEF DESCRIPTION OF THE DRAWINGS

[0019] The accompanying drawings, which are incorporated in and constitute a part of this specification, illustrate certain embodiments, and together with the written description, serve to explain certain principles of the compositions and methods disclosed herein.

[0020] FIGS. 1 (and FIG. 16) depict the organization of different structural motifs of a coronaviral spike protein as described in the detailed description.

[0021] FIGS. 2A-2J (and FIGS. 17a-17j as described in legend) depict the isolation of SARS-CoV-2 neutralizing antibodies from a convalescent donor as described in the Examples. 2A, Plasma neutralization against SARS-CoV-2 and from convalescent (C) and healthy (H) donors. Convalescent donor #3, darkened circle, was selected for B cell sorting based on high plasma neutralization against IL1/2020 and high magnitude binding antibodies to NTD, RBD, and S trimer measured in a multiplex bead-based assay. Bars indicate median value. 2B, The percentage of isolated monoclonal antibodies binding to subdomains of Spike (S). 2C, Neutralization potency of isolated WRAIR mAbs segregated by subdomain binding specificity. IC50=50% inhibitory concentration (μg ml⁻¹) from the SARS-CoV-2 (IL1/2020) pseudotyped assay. Shown are the mean IC50 values calculated from 3 independent experiments. 2D, Correlation between neutralization potency (IC50) for NTD-(left, n=14 XY pairs) and RBD-(right, n=18 XY pairs) directed mAbs and their respective binding magnitude to the SARS-CoV-2 stabilized S trimer, obtained from a single experiment. A significant (inverse) correlation was only observed for the WRAIR RBD-directed mAbs. Spearman r values are indicated above each graph with p values (two-tailed). 2E, 2F, Neutralization curves of the most potent NTD- and RBD-directed neutralizing antibodies as measured in the (2E) pseudotyped and (2F) authentic SARS-CoV-2 assays, using strains IL1/2020 and INMI1/2020, respectively, which share identical S sequence. Plotted are mean±s.e.m from 3 (2e) or 2 (2f) independent experiments. The IC50 (pg ml⁻¹) for each mAb is indicated in parenthesis and calculated using a 5-parameter regression analysis. 2G, Correlation between the pseudotyped (pSV) and authentic virus assays, n=24 XY pairs. Spearman r value is indicated above the graph with p value (two-tailed). 2H, NTD and RBD WRAIR mAb binding to cell-surface expressed S using 293F cells as measured by flow cytometry. Black line indicates mean value and asterisks represent significance by two-tailed Mann-Whitney t-test, p=0.0009. Dotted line indicates positivity threshold. 2I, 2J, Assessment of NTD and RBD mAbs recruitment of (2I) Fc-mediated complement (ADCD) and (2J) phagocytic activities (ADCP and ADNP). ADCD was measured using a S-expressing 293F cell line whereas phagocytic activities were determined using the stabilized S trimer. Black horizontal line indicates mean value and asterisks represent significance by two-tailed Mann-Whitney t-test, p<0.0001. Dotted line indicates positivity threshold. 2H-2J, shown are representative data (n=2) from a single experiment. In panels 2C, 2D, 2H-2J, neutralizing and non-neutralizing mAbs are in closed and open circles, respectively, while the control RBD mAb CR3022 is shown as a gray closed circle in panels 2H-2J.

[0022] FIGS. 3A-3C (and FIGS. 18a-18c as described in legend) depict epitope mapping and structural characterization of WRAIR NTD mAbs as described in the Examples. 3A, epitope binning of NTD-directed mAbs via a Bio-Layer Interferometry (BLI)-based competition assay. Values represent the % residual binding of the indicated second antibody after saturation of the antigen (NTD domain) with the indicated first antibody. Shading from dark to light indicates competition strength ranging from strong (0-25%), to intermediate (25--50%), to none (>50%). Competition groups are indicated by boxes. 3A (CONT.), binding responses of NTD-directed mAbs, segregated by competition group, to the stabilized S trimer measured by BLI. 3B, epitope mapping of NTD A mAbs using a shotgun mutagenesis platform. Heat map shows % binding to NTD mutants, harboring a single change to Alanine at the indicated position, relative to wild-type. 3B (CONT.), The NTD (residues 14-303) is shown in the context of SARS-CoV-2 trimer (PDB 6ZGE) with loops N1, N3 and N5 colored in shades of grey. 3B, CONT. 2 and 3B (CONT. 3), Key binding residues are shown on the NTD structure with side chains shown in stick representation. 3C, Residues identified in the viral escape assay in the presence of NTD antibodies at the indicated concentrations. 3C (CONT.), The same residues are shown in stick representation on the NTD structure.

[0023] FIGS. 4A-4G (and FIGS. 19a-19g as described in legend) depict the structure and epitope determination of SARS-CoV-2 RBD targeting mAbs as described in the Examples. 4A, Epitope binning of RBD-directed mAbs via a BLI-based competition assay. Values represent the % residual binding of the indicated second antibody after saturation of the antigen (RBD molecule) with the indicated first antibody. Shading from dark to light indicates competition strength ranging from strong (0-25%), to intermediate (25-50%), to lack thereof (>50%). Competition groups are indicated by black boxes. Control antibodies RBD-A, RBD-B and RBD-C were CC12.1, CC12.16 and CR3022, respectively. 4B-4D, Top panel: Representative crystal structures of RBD targeting antibodies for WRAIR RBD group A, B and C are shown. RBD A mAbs, WRAIR-2125 and WRAIR-2173 target the ACE2 binding site. RBD B mAb, WRAIR-2057 recognizes a novel epitope on the “side” of the RBD distal from the ACE2 binding site centered on residue E465. RBD C mAb, WRAIR-2151 targets a CR3022-like site on the RBD. Bottom panel: Epitope footprints of respective antibodies are shown on the surface of the RBD and shaded based on the antibody heavy and light chain colors. RBD contacting residues are shown as sticks, with residues seen in VOCs highlighted in bold. 4E, Structures of WRAIR RBD A. B and C antibodies are shown on a single RBD molecule to highlight the different recognition modes. 4F, RBD A, B and C epitopes are shown on the RBD surface with the ACE2 binding interface highlighted in black/white line. 4G, Epitope mapping of WRAIR-2125 and-2173 contact residues identified in the shotgun mutagenesis and viral escape experiments, or both are shown in stick representation.

[0024] FIGS. 5A-5C (and FIGS. 20a-20c as described in legend) depict WRAIR mAbs showing low-dose prophylactic protection in the K-18 hACE-2 mouse model as described in the Examples. 5A-5C, Antibodies were infused intravenously at a single high dose of 400 pg (20 mg kg⁻¹) (5A, 5A (CONT., CONT. 2)) or low doses of 20 μg (1 mg kg⁻¹) and lower (5B, 5C) into groups of mice (n=15/group). Mice were challenged intranasally 24 hours later with 1.25×10⁴ viral particles (1.25×10⁴ plaque-forming units) of SARS-CoV-2 (WA1/2020). SARS-CoV-2 viral loads in lung tissue were measured 2 days post-challenge in a subset of animals (n==5/group) by plaque assay. Bars indicate the mean group value with standard deviation. The remaining mice (n=10/group) were assessed daily for weight and clinical symptoms. 5C, Assessment of Fc effector functions on animal protection for NTD and RBD antibodies. Wild-type and LALA-PG versions of mAb WRAIR-2039 (NTD) and WRAIR-2123 (RBD) were compared at 20 μg (1 mg kg-r). For weight loss and viral load in lungs, asterisks indicate significance compared to the ZIKV_MZ4 monoclonal antibody isotype control group, by one-way ANOVA with Dunnett's multiple comparisons test. Survival curves were compared individually to the isotype control using a Mantel-Cox log-rank test. For all tests, ****P<0.0001, ***P<0.001, **P<0.01, *P<0.5 and ns: not significant (P>0.5).

[0025] FIGS. 6A-6F (and FIGS. 21a-21f as described in legend) depict NTD/RBD mAb combinations showing low dose in vivo protection and a higher genetic barrier for viral escape as described in the Examples. 6A, Binding competition to the stabilized trimer as described in FIG. 2a. 6B, Negative-stain 3D reconstruction of SARS-CoV-2 spike in complex with WRAIR-2025 (NTD) and WRAIR-2173 (RBD) Fabs. 6C, Prophylactic treatment in the K-18 hACE-2 SARS-CoV-2 mouse model. Antibodies were infused intravenously at a dose of 20 μg (1 mg kg⁻¹) as single mAbs or combinations (1:1 ratio) into groups of mice (n=15/group). Mice were challenged intranasally 24 hours later with 1.25×10⁴ viral particles (1.25×10⁴ plaque-forming units) of SARS-CoV-2 (WA1/2020). SARS-CoV-2 viral loads in lung tissue were measured 2 days post-challenge in a subset of animals (n=5/group) by plaque assay. Bars indicate the mean group value with standard deviation. The remaining mice (n=10/group) were assessed daily for weight and clinical symptoms. 6E, Therapeutic treatment in the K-18 hACE-2 SARS-COV-2 mouse model. Antibodies were infused intravenously at the indicated dose 24 hours after challenge, performed as indicated above. Mice (n=15/group) were assessed daily for weight and clinical symptoms. 6D-6E, For weight loss and viral load in lungs, asterisks indicate significance compared to the ZIKV_MZ4 isotype control group by one-way ANOVA with Dunnett's multiple comparisons test. Survival curves were compared individually to the isotype control using a Mantel-Cox log-rank test. For all analysis, ****P<0.0001, ***P<0.001, **P<0.01, *P<0.5 and ns: not significant (P>0.5). 6F, Viral titers of a replicative rVSV/SARS-CoV2/GFP virus obtained after two passages in the presence of single mAbs or combinations. Plotted are means from 2 independent experiments.

[0026] FIGS. 7A-7D (and FIGS. 22a-22d as described in legend) depict WRAIR mAb binding and neutralization against current circulating variants of concern (VOC) as described in the Examples. 7A, Binding of NTD-(7A) and RBD-(7a (CONT.) left) mAbs to stabilized S trimer (S-2P) or RBD mutants (7A (CONT.), right) harboring mutations present in VOC and VOI assessed by BLI. Heat-map shows the log 2 fold change in binding relative to a WA1/2020 D614G S-2P spike or WA1/2020 RBD proteins with loss and gain in binding. 7B, Neutralization activity of NTD and RBD mAbs, either singly or in combinations, against a panel of pseudotyped viruses representing the current circulating VOCs. Heat-map indicates IC50 values (μg ml⁻¹) ranging from very potent (hatched), to intermediate (light dots), to poorly neutralizing (black), with non-neutralizing mAbs in white. 7C, Same data as in (7B) but represented as fold change in IC50 relative to the IL1/2020 virus. Neutralization escape is defined as a fold increase in IC50 >100. 7D, Comparison of epitopes (outlined) between WRAIR-2125, S2E12, REGN10933 and LY-CoV555 with RBD neutralization escape residues shown in stick representation. FIG. 7D (CONT.), left, WRAIR-2125 and S2E12 heavy and light chain CDR loop contact residues are shown in ribbon representation, with the RBD shown in surface representation, residue F486 is indicated. FIG. 7D (CONT.) right, Antibody buried surface areas for the four RBD residues that differ in VOC/VOI.

[0027] FIGS. 8A-8D (and FIGS. 23a-23d as described in legend) depict the serology of convalescent donors and the sorting strategy used to isolate SARS-CoV-2 reactive B cells as described in the Examples. 8A, Correlation of plasma binding magnitude and neutralization potency of convalescent COVID-19 donors. Spearman r and p (two-tailed) values are indicated above each graph. n=41 XY pairs for each of the test. 8B, Antigens used to sort SARS-CoV-2 positive B cells. Two sorting strategies were performed using either a stabilized S trimer (HexaPro) or a multivalent Spike ferritin nanoparticle (SpFN) displaying 8 Spike trimers, to isolate antibodies targeting conformational or quaternary epitopes, in addition to S1, RBD and S2 SARS-CoV-2 subdomain antigens (FIG. 8B, CONT.). 8C, Gating strategy used to sort antigen⁺ B cells with the percentage of SARS-CoV-2 antigen positive B cells from a pre-pandemic donor and SARS-CoV-2 convalescent Donor #3 obtained with the two complementary sorting approaches, using the stabilized S trimer (8C (CONT.)) or SpFN (FIG. 8C (CONT2.). 8D, Individual CD19+ SARS-CoV-2 reactive B cells encoding SARS-CoV-2 neutralizing mAbs indicated in the flow cytometry plots for the stabilized S trimer (FIG. 8D (CONT.), left) and SpFN nanoparticle (FIG. 8D (CONT.)) sorts.

[0028] FIGS. 9A-9D (and FIGS. 24a-24d as described in legend) depict the genetics and cross-reactivity of characterized WRAIR NTD and RBD mAbs as described in the Examples. 9A, Gene assignment was performed with IgBlast and CDRs were annotated using IMGT. SHM, somatic hypermutation; CDR, complementarity determining region. Sequence identifiers corresponding to the CDRs depicted in the table are shown. Sequence identifiers corresponding to the CDRs depicted in the table are shown. SEQ ID NOS: 1109-1138 correspond to CDRH1, SEQ ID NOS: 1139-1168 correspond to CDRH2; SEQ ID NOS: 1169-1198 correspond to CDRH3; SEQ ID NOS: 1199-1228 correspond to CDRL1; SEQ ID NOS: 1229-1258 correspond to CDRL3. IC50 values from the pseudovirus neutralization assay, as well as competition groups are indicated. Only two clonally related mAbs were identified, WRAIR-2008 and-2037. 9B, 9C, Binding of WRAIR NTD (9B) and RBD (9C) mAbs to a panel of 26 human CoV and HIV control (gp140 and gp41) antigens, assessed in a multiplex bead-based assay. Binding magnitude is expressed as signal/noise (S/N) ratio, with noise calculated from an HIV mAb antibody control (MZ4). S/N≥10 (dotted line) were considered positive based on negative control binding. 9D, SARS-CoV-1 (Sinol-11) neutralization activity in a pseudotyped assay. Data are mean from two independent experiments. WRAIR-2063 is indicated with the IC50 (μg ml⁻¹) indicated in parenthesis. The CR3022 positive control is shown. Other WRAIR RBD and NTD nAbs that did not neutralize SARS-CoV-1 are also depicted.

[0029] FIGS. 10A-10C (and FIGS. 25a-25c as described in legend) depict the binding affinity and functional characteristics of WRAIR mAbs against SARS-CoV-2 IL1/2020 as described in the Examples. 10A, Binding affinity constants of WRAIR RBD and NTD mAbs measured against their respective domains using BLI. At least 4 curves from a dilution series were used to calculate the equilibrium dissociation constant (KD) using a 1:1 binding model. KD values are shown. 10B, Neutralization curves of WRAIR RBD (10B) and NTD (10B (CONT.)) mAbs obtained in the pSV assay. Shown are means from at least 2 independent experiments. Error bars were omitted for clarity. 10C, Comparison of neutralization activities between IgG1 and Fabs. Potent NTD- or RBD-neutralizing antibodies were assessed for neutralization in the PSV assay either as IgG1 or Fabs. Shown is the fold increase in IC50 observed with the Fab versions of each mAb compared to its IgG1 counterpart. IC50 (pg ml⁻¹) values obtained with Fabs are indicated in parentheses.

[0030] FIGS. 11A-11C (and FIGS. 26a-26c as described in legend) depict the Fc effector functions of WRAIR mAbs against SARS-CoV-2 IL1/2020 as described in the Examples. 11A, Titrations of WRAIR NTD (11A and 11A (CONT.)) and RBD mAbs (11A (CONT. 2) and 11A (CONT. 3)) in the Fc effector function assays. Antibodies are shaded according to their competition groups. Fc effector functions were measured twice and shown are data from a single representative experiment. A Fc mutant control (LALA-PG) is shown for reference. 11B, Correlation between neutralization activity and phagocytic activities for all mAbs. Spearman r and p (two-tailed) values are indicated above the graph, n=31 XY pairs. 11C, Difference in ADNP score between NTD neutralizing and non-neutralizing mAbs. Black horizontal line indicates mean value and asterisks represent significance by two-tailed Mann-Whitney t-test, p=0.0006, n=7. Dotted line indicates positivity threshold.

[0031] FIGS. 12A-12G (and FIGS. 27a-27g as described in legend) depict epitope mapping and structural characterization WRAIR RBD mAbs as described in the Examples. 12A, ACE2 blocking activity of WRAIR RBD mAbs. WRAIR RBD A (12A) and B and C (12A (CONT.)). mAbs were assessed for their ability to block hACE2 binding to SARS-CoV-2 RBD in a BLI-based assay. The half maximal effective concentration (EC50) in μg ml⁻¹ is indicated in parentheses. 12B-12D, Details of RBD A (WRAIR-2125 and-2173) (12B), RBD B (WRAIR-2057) (12C) and RBD C (WRAIR-2151) (12D) epitopes. Antibody residues are shown in stick representation and RBD residues are shown in line representation. Contributing heavy and light chain CDRs are shown and labelled. CDR loops are designated using the Kabat numbering system. 12E, Epitope mapping of RBD A mAbs using a shotgun mutagenesis platform. Heat map shows % binding to RBD mutants, harboring a single change to Alanine at the indicated position, relative to wild-type. 12F, Residues identified in the viral escape assay in presence of RBD antibodies at the indicated concentrations. Asterisks indicate mutations found only in half of the sequences obtained. 12G, Structures of WRAIR RBD A, B and C antibodies are overlaid on previously reported antibodies (representing frequently observed SARS-CoV-2 epitopes) (Rapalog et al., Science, 2021, 371: 823-829). 12G and 12G (CONT.), left panel: WRAIR-2057 antibody and epitope is shown on the RBD surface in the context of previously reported antibody classes. 12 G (CONT.), right panel: WRAIR-2125, WRAIR-2173 and WRAIR-2151 are shown with representative Class 1, 2, 3 and 4 mAbs.

[0032] FIGS. 13a-13b (and FIGS. 28a-28c as described in legend) depict structures as described in the Examples. 13A, Left panel: C002 structure is overlaid onto the WRAIR-2125 structure. 13A, right panel: Frequently occurring SARS-CoV-2 VOC residues are shown as sticks on the RBD surface with WRAIR-2125 and C002 epitopes indicated. 13A (CONT.): Buried surface area (BSA) for VOC residues, related to the mAbs WRAIR-2125 and C002 are shown as dot plots. T symbol is used to designate the “tip” of the RBD molecule. 13C, MAb CV38-142 structure is overlaid onto the WRAIR-2057-RBD complex structure.

[0033] FIGS. 14A-14D (and FIGS. 29a-29d as described in legend) depict the characterization of LALA-PG mutant mAbs and negative stain electron microscopy of Spike-Fab complexes. 14A, Characterization of the LALA-PG mutant forms of the NTD mAbs WRAIR-2039, 2025 and 2004 (circles) and RBD mAbs WRAIR-2173 and 2123 (squares) in cell surface S binding (left), ADCD (middle) and ADNP (right) assays. Non-significant differences in binding to cell surface S was observed between WT and mutants in a Wilcoxon matched-pairs signed rank test, P==0.3125. LALA-PG mutants did not show any activity in the ADCD and ADNP assays. 14B, Neutralization curves of WT and LALA-PG versions of WRAIR-2039 (NTD) and-2123 (RBD) mAbs obtained in the pSV assay. Shown are mean SD from at least 2 independent experiments. IC50 (μg ml⁻¹) are indicated in parentheses in the legend. 14C, EM analysis of WRAIR-2173 and WRAIR-2025 Fabs in complex with SARS-CoV-2 spike (S-2P) trimer. Left panel: Raw image (top) and two-dimensional class particle averages (bottom, 5 averages shown). The black bar represents 500 Å. Right panel: Gold-standard FSC curves for the EM 3D reconstruction. 14C (CONT.): Negative-stain 3D reconstruction of SARS-CoV-2 spike and Fab complex. The structural model of the SARS-CoV-2 trimer (PDB 6X2B) in complex with WRAIR-2173 and WRAIR-2025 Fabs is shown in ribbon representation while negative-stain electron density map is shown as a white transparent surface. A feature less and unbiased (lowpass filter: 100 Å) 3D model of SARS-CoV-2 spike trimer (PDB: 6VXX) and 12,574 particles were used to perform the 3D reconstruction from a single experiment. 14D, EM analysis of WRAIR-2025 Fab in complex with SARS-CoV-2 spike (S-2P) trimer. Left panel: Raw image (top) and two-dimensional class averages (bottom, 5 averages shown) of Fab-Spike particles. The black scale bar represents 500 Å. Right panel: Gold-standard FSC curves for the EM 3D reconstruction. 14D (CONT).: Negative-stain 3D reconstruction of SARS-CoV-2 Spike and Fab complex. The structural model of the SARS-CoV-2 trimer (PDB 6VXX) and WRAIR-2025 Fab is shown in ribbon representation while negative-stain electron density map is shown as a white transparent surface. A feature less and unbiased (lowpass filter: 100 Å) 3D model of SARS-CoV-2 spike trimer (PDB: 6VXX) and 3,364 particles were used to perform the 3D reconstruction from a single experiment.

[0034] FIGS. 15A-B (and FIGS. 30a-30b as described in the legend) depict the functional activities of WRAIR mAb combinations against SARS-CoV-2 IL1/2020 and characterization of variant binding as described in the Examples. 15A, Functional activities of NTD/RBD (FIG. 15A) and RBD/RBD (FIG. 15A (CONT.) mAb combinations. WRAIR-2039, -2025 (NTD) and WRAIR-2123, -2125 and -2173 (RBD) were mixed in a 1:1 ratio as indicated and the cocktail was assessed for neutralization (pSV assay) and Fc effector functions. Single mAbs or cocktail were tested at the same final antibody concentration. IC50 values (μg ml⁻¹) obtained in the pSV assay from 2 independent experiments are indicated in parentheses. ADCD and ADNP activities were measured twice and shown are data from a single representative experiment. The WRAIR-2039 LALA-PG negative control is shown as open circles and dotted line. 15B, Effect of mutations present in VOC and VOI on the binding on-rate and off-rate of NTD-directed mAbs. Binding on-rates (left) and off-rates (right) to stabilized S trimer (S-2P) harboring mutations present in the indicated variant was assessed by BLI. On- and off-rates were obtained by fitting the binding curves of mAbs at a single concentration of 200 nM using a 1:1 binding model. Heat-map shows the log 2 fold change relative to a WA1/2020 D614G S-2P spike protein with negatively impacted mAbs (by either a decrease in on-rate or increase in off-rate) as shown. mAb with improved binding kinetics, compared to the WT are shown. NB indicates absence of value due to lack of binding.

### DETAILED DESCRIPTION

[0035] Reference will now be made in detail to various exemplary embodiments, examples of which are illustrated in the accompanying drawings. It is to be understood that the following detailed description is provided to give the reader a fuller understanding of certain embodiments, features, and details of aspects of the disclosure, and should not be interpreted as a limitation of the scope of the disclosure.

### Definitions

[0036] In order for the present disclosure to be more readily understood, certain terms are first defined below. Additional definitions for the following terms and other terms may be set forth through the specification. If a definition of a term set forth below is inconsistent with a definition in an application or patent that is incorporated by reference, the definition set forth in this application should be used to understand the meaning of the term.

[0037] As used in this specification and the appended claims, the singular forms “a,” “an,” and “the” include plural references unless the context clearly dictates otherwise. Thus, for example, a reference to “a method” includes one or more methods, and/or steps of the type described herein and/or which will become apparent to those persons skilled in the art upon reading this disclosure and so forth.

[0038] The term “antibody” or “antibodies” as used in this disclosure refers to an immunoglobulin or an antigen-binding fragment thereof As will be understood by those in the art, the immunological binding reagents encompassed by the term “antibody” or “antibodies” extend to all antibodies from all species, and antigen binding fragments thereof and include, unless otherwise specified, polyclonal, monoclonal (mAb or mAbs), monospecific, bispecific, polyspecific, humanized, human, camelised, mouse, non-human primates, single-chain, chimeric, synthetic, recombinant, hybrid, mutated, CDR-grafted, and in vitro generated antibodies. The antibody can include a constant region, or a portion thereof, such as the kappa, lambda, alpha, gamma, delta, epsilon and mu constant region genes. For example, heavy chain constant regions of the various isotypes can be used, including: IgG₁, IgG₂, IgG₃, IgG₄, IgM, IgA₁, IgA₂, IgD, and IgE. By way of example, the light chain constant region can be kappa or lambda.

[0039] The terms “antigen-binding domain” and “antigen-binding fragment” refer to a part of an antibody molecule that comprises amino acids responsible for the specific binding between antibody and antigen. For certain antigens, the antigen-binding domain or antigen-binding fragment of an antibody molecule may only bind to a part of the antigen. The part of the antigen that is specifically recognized and bound by the antibody is referred to as the “epitope” or “antigenic determinant.” Antigen-binding domains and antigen-binding fragments include Fab (Fragment antigen-binding); a F(ab′)₂ fragment, a bivalent fragment having two Fab fragments linked by a disulfide bridge at the hinge region; Fv fragment; a single chain Fv fragment (scFv) see e.g., Bird et al. (1988) Science 242:423-426; and Huston et al. (1988) Proc. Natl. Acad. Sci. USA 85:5879-5883); a Fd fragment having the two V_{H} and CHI domains; dAb (Ward et al., (1989) Nature 341:544-546), and other antibody fragments that retain antigen-binding function. The Fab fragment has V_{H}-C_{H}1 and V_{L}-C_{L} domains covalently linked by a disulfide bond between the constant regions. The Fv fragment is smaller and has V_{H} and V_{L} domains non-covalently linked. To overcome the tendency of non-covalently linked domains to dissociate, a scFv can be constructed. The scFv contains a flexible polypeptide that links (1) the C-terminus of V_{H} to the N-terminus of V_{L}, or (2) the C-terminus of V_{L} to the N-terminus of V_{H}. These antibody fragments are obtained using conventional techniques known to those with skill in the art, and the fragments are evaluated for function in the same manner as are intact antibodies.

[0040] The terms “(cross)-binding” and “(cross)-reactivity” are used interchangeably herein to mean the ability of an antibody to bind to similar target on multiple Coronaviruses. The extent to which one antibody is able to bind with another coronavirus target, and therefore whether it can be said to cross-bind, as used herein, can be determined using binding assays to multiple antigens from multiple coronaviruses. One particularly suitable quantitative cross-binding assay is described in the Examples. Briefly, binding of monoclonal antibodies (mAbs) to SARS-CoV-2, SARS-CoV, MERS-CoV, hCoV-HKU1, hCoV-OC43, hCoV-NL63 and hCoV-229E epitopes was evaluated using a multiplex Luminex assay. Antigens from were covalently coupled to uniquely coded carboxylated magnetic microspheres (Luminex Corp., Austin TX), and microspheres were activated by incubation in buffer containing 1-Ethyl-3[3-dimethylaminopropyl]carbodiimide hydrochloride and N-hydroxysulfosuccinimide for 20 min. Following activation, beads were incubated with antigen or streptavidin for 2 hr to allow coupling via the primary amine. Biotinylated antigens were then bound to streptavidin-coated microspheres for 2 hr followed by addition of free biotin to quench the reaction. Following coupling, coated microspheres were washed and stored at −80° C. in PBS containing 0.1% BSA, 0.05% sodium azide and 0.02% Tween-20. Purified mAbs were incubated with a cocktail of coronavirus antigen-coupled beads for 2 hours at room temperature. Following 3 washes with PBS containing 0.1% BSA, 0.05% sodium azide and 0.02% Tween-20, bound antibodies were detected by incubation R-phycoerthrin (PE)-conjugated mouse anti-human IgG (0.5 μg/mL, Southern Biotech, Birmingham AL) for 1 hour at room temp followed by a final wash and resuspension in Luminex® sheath fluid (Luminex Corp). Samples were assayed on a FlexMap3D® with xPONENT v4.2 software (Luminex Corp). CR3022, P2B-2F6, and VRC01 mAbs were included on each assay plate in addition to no-sample control wells. For each antigen assayed, the median fluorescent intensity (MFI) from samples (signal) was normalized by dividing by the MFI of no-sample wells (noise). If the signal:noise ratio was greater than 5 or 10, mAbs were reported as positive for cross-antigen binding.

[0041] The term “Epitope binning” is a term used to describe segmentation of a panel of monoclonal antibodies into bins based upon the antigen region, or epitope, bound by each antibody. This grouping is performed using cross competition assays. One particularly suitable quantitative cross-competition assay is described in the Examples. Briefly, epitopes of monoclonal antibodies are mapped by binding competition against e.g., a set of characterized control antibodies (RBD) using Bio-Layer Interferometry (BLI). Streptavidin (SA) sensors (ForteBio) loaded with either biotinylated antigen proteins are immersed into wells containing a first competing antibody to saturate all binding sites. Next, biosensors are dipped into wells containing the second antibody, in the presence of the first competing antibody (all at 100 nM), and then binding is measured after time for association. Residual binding signal of ae second antibody is expressed as a percentage of the maximum binding signal obtained in absence of the first competing antibody, ran in parallel. Antibodies are defined as competing when a binding signal of the second antibody is reduced to less than 30% of its maximum binding capacity and non-competing when binding was greater than 70%.

[0042] As used herein, a “therapeutically effective amount” of an antibody refers to an amount of an antibody that is effective, upon single or multiple dose administration to a subject (such as a human patient) at treating and/or preventing coronavirus infection.

[0043] The terms “treatment of a coronavirus infection” or “treating a corona virus infection” and the like refer to any treatment of any disease (e.g., COVID-19) or condition in a subject caused by a coronavirus infection and includes inhibiting a disease, condition, or symptom of a coronavirus infection, e.g., arresting its development and/or delaying or preventing its onset or manifestation in the subject; relieving a disease, condition, or symptom of a coronavirus, e.g., causing regression of the condition or disease and/or one or more of its symptoms (e.g., fever, shortness of breath); or preventing or reducing the recurrence or relapse of a disease, condition, or symptom of a coronavirus infection.

[0044] The term “coronavirus infection” refers to an infection due to a coronavirus including an infection due to SARS-CoV-1, SARS-CoV-2, Middle East Respiratory Syndrome (MERS)-CoV (MERS-CoV), hCoV-HKU1, and hCoV-OC43 and the α-genera CoVs, hCoV-NL63 and hCoV-229E.

[0045] The term “coronavirus” refers to any coronavirus, e.g. a human coronavirus, such as SARS-CoV-1, SARS-CoV-2, Middle East Respiratory Syndrome (MERS)-CoV (MERS-CoV), hCoV-HKU1, and hCoV-OC43 and the α-genera CoVs, hCoV-NL63 and hCoV-229E.

[0046] The term “COVID-19” refers to coronavirus disease 2019, the disease caused by SARS-CoV-2.

[0047] The terms “subject,” “host,” “patient,” and “individual” are used interchangeably herein to refer to any mammalian subject for whom diagnosis or therapy is desired, particularly humans.

[0048] The term “pharmaceutically acceptable excipient” means solvents, diluents, dispersion media, coatings, antibacterial agents and antifungal agents, isotonic agents, solid and liquid fillers, and absorption delaying agents, and the like, that are suitable for administration into a human. The use of such media and agents for pharmaceutically active substances is well known in the art.

[0049] The term “human antibody” refers to an antibody having variable and constant regions corresponding substantially to human germline immunoglobulin sequences. A human antibody may also include amino acid residues not encoded by human germline immunoglobulin sequences (e.g., mutations introduced by random or site-specific mutagenesis in vitro or by somatic mutation in vivo), for example in the CDRs, and in particular, CDR3. As disclosed herein, a human antibody may be produced using recombinant methods.

[0050] The term “recombinant antibody” refers to an antibody produced or expressed using a recombinant expression vector, where the expression vector comprises a nucleic acid encoding the recombinant antibody, such that introduction of the expression vector into an appropriate host cell or transgenic animal results in the production or expression of the recombinant antibody.

[0051] As is known in the art, recombinant antibodies, are not merely proteins isolated from a human donor, but are proteins that are produced in a host cell or transgenic animal. Appropriate host cells and suitable transgenic animals for production of the antibodies of the disclosure are described in Gene Expression Systems, Academic Press, eds. Fernandez et al., 1999. Suitable production hosts include yeast, mammalian, bacterial or insect cells or transgenic animals such as transgenic Drosophila or mice. The recombinant antibodies of the disclosure are glycosylated. The amount of glycosylation by weight for the IgG, IgM, IgA, IgD and IgE is typically about 3% a 12%, 10%, 13% and 12%, respectively. The glycosylation pattern of a recombinant human protein varies from the glycosylation pattern of its natural human protein counterpart since glycosylation is dependent upon the type of host cell or organism used to express the recombinant protein.

[0052] As is also known in the art, the glycosylation patterns of recombinant antibodies are not the same as those of any existing natural counterparts, even when the antibodies are expressed in human cells. See Nallet et al., New Biotechnology, 2012, 29: 471-476 who report that IgG expressed in a human embryonic kidney cell line results in similar, but not identical, glycosylation patterns in comparison to those expressed in humans. Further, Luac et al., Biochimica et Biophysica Acta, 2015, 1860: 1574-1582 reports that variation in glycosylation patterns for IgG differ between and within humans. Accordingly, the recombinant monoclonal antibodies of the instant disclosure are structurally distinguishable from antibodies obtained from human donors.

[0053] The term “neutralizing antibody” refers to an antibody whose binding an antigen results in inhibition of the biological activity of that antigen, respectively. For example, a “coronavirus neutralizing antibody “or “a SARS-CoV-2 neutralizing antibody” refers to an antibody whose binding to a coronavirus, such as SARS-CoV-2, results in the inhibition of the biological activity of the coronavirus. This inhibition of the biological activity of coronavirus, such as SARS-CoV-2 can be assessed by measuring one or more indicators of coronavirus activity biological activity, such as an ability to enter host cells using, e.g. a plaque assay as known in the art.

[0054] The term “isolated antibody,” refers to an antibody that is substantially free of its natural environment, including other antibodies having different antigenic specificities (e.g., an isolated antibody that specifically binds a coronavirus, such as SARS-CoV-2, is substantially free of antibodies that specifically bind other epitopes or other antigens than a coronavirus, unless the isolated antibody is combined with one or more isolated antibodies of interest, such as an antibody that specifically binds a second coronavirus).

[0055] The term “isolated nucleic acid,” as used in the context of a nucleic acid encoding an antibody, or antigen-binding fragment thereof, refers to a nucleic acid molecule in which the nucleotide sequences encoding the antibody, or antigen-binding fragment thereof, are free of other nucleotide sequences encoding antibodies or portions thereof that bind antigens other than a coronavirus, which other sequences may naturally flank the nucleic acid in human genomic DNA. Thus, for example, an isolated nucleic acid encoding a V_{H} region of a coronavirus antibody contains no other sequences encoding other V_{H} regions that bind antigens other than the coronavirus.

[0056] The term “identity,” as known in the art, is a relationship between two or more polypeptide sequences or two or more polynucleotide sequences, as determined by comparing the sequences. In the art, “identity” also means the degree of sequence relatedness between polypeptide or polynucleotide sequences, as determined by the match between strings of such sequences. “Identity” and “similarity” can be readily calculated by known methods, including, but not limited to, those described in Computational Molecular Biology, Lesk, A. M., ed., Oxford University Press, New York, 1988; Biocomputing: Informatics and Genome Projects, Smith, D. W., ed., Academic Press, New York, 1993; Computer Analysis of Sequence Data, Part I, Griffin, A. M., and Griffin, H. G., eds., Humana Press, New Jersey, 1994; Sequence Analysis in Molecular Biology, von Heinje, G., Academic Press, 1987; and Sequence Analysis Primer, Gribskov, M. and Devereux, J., eds., M Stockton Press, New York, 1991; and Carillo, H., and Lipman, D., Siam J. Applied Math., 48:1073 (1988).

[0057] Typical methods to determine identity are designed to give the largest match between the sequences tested. Methods to determine identity and similarity are codified in publicly available computer programs. Typical computer program methods to determine identity and similarity between two sequences include, but are not limited to, the GCG program package (Devereux, J., et al., Nucleic Acids Research 12(1): 387 (1984)), BLASTP, BLASTN, and FASTA (Atschul, S. F. et al., J. Molec. Biol. 215:403-410 (1990). The BLAST X program is publicly available from NCBI and other sources (BLAST Manual, Altschul, S., et al., NCBINLM NIH Bethesda, Md. 20894: Altschul, S., et al., J. Mol. Biol. 215:403-410 (1990). The well-known Smith Waterman algorithm may also be used to determine identity. IgBlast may also be used to determine germline V, D and J gene matches to a query sequence, which is available on the world wide web at ncbi.nlm.nih.gov/igblast/.

[0058] The term “preventing” or “prevention” refers to a reduction in risk of acquiring or developing a disease or disorder (i.e., causing at least one of the clinical symptoms of the disease not to develop) in a subject that may be exposed to a disease-causing agent, or predisposed to the disease in advance of disease onset, such as exposure to a coronavirus, e.g. SARS-CoV-2.

[0059] The term “prophylaxis” is related to “prevention” and refers to a measure or procedure the purpose of which is to prevent, rather than to treat or cure a disease.

[0060] Antibodies

[0061] Antibodies, also known as immunoglobulins, are typically tetrameric glycosylated proteins composed of two light (L) chains of approximately 25 kDa each and two heavy (H) chains of approximately 50 kDa each. Two types of light chain, termed lambda and kappa, may be found in antibodies. Depending on the amino acid sequence of the constant domain of heavy chains, immunoglobulins can be assigned to five major classes: A, D, E, G, and M, and several of these may be further divided into subclasses (isotypes), e.g., IgG₁, IgG₂, IgG₃, IgG₄, IgA₁, and IgA₂. Each light chain includes an N-terminal variable (V) domain (V_{L}) and a constant (C) domain (C_{L}). Each heavy chain includes an N-terminal V domain (V_{H}), three or four C domains (CHs), and a hinge region. The C_{H} domain most proximal to V_{H} is designated as CHI. The V_{H} and V_{L} domains consist of four regions of relatively conserved sequences called framework regions (FR1, FR2, FR3, and FR4), which form a scaffold for three regions of hypervariable sequences (complementarity determining regions, CDRs). The CDRs contain most of the residues responsible for specific interactions of the antibody with the antigen. CDRs are referred to as CDR1, CDR2, and CDR3. Accordingly, CDR constituents on the heavy chain are referred to as H1, H2, and H3, while CDR constituents on the light chain are referred to as L1, L2, and L3. Identification and numbering of framework and CDR residues is as described by Chothia et al., Structural determinants in the sequences of immunoglobulin variable domain, J Mol Biol 1998, 278:457-79, which is hereby incorporated by reference in its entirety.

[0062] CDR3 is typically the greatest source of molecular diversity within the antibody-binding site. H3, for example, can be as short as two amino acid residues or greater than 26 amino acids. The subunit structures and three-dimensional configurations of different classes of immunoglobulins are well known in the art. For a review of the antibody structure, see Antibodies: A Laboratory Manual, Cold Spring Harbor Laboratory, eds. Harlow et al., 1988. One of skill in the art will recognize that each subunit structure, e.g., a CH, VH, CL, VL, CDR, FR structure, comprises active fragments, e.g., the portion of the VH, VL, or CDR subunit the binds to the antigen, i.e., the antigen-binding fragment, or, e.g., the portion of the CH subunit that binds to and/or activates, e.g., an Fc receptor and/or complement. The CDRs typically refer to the Kabat CDRs, as described in Sequences of Proteins of Immunological Interest, US Department of Health and Human Services (1991), eds. Kabat et al. Another standard for characterizing the antigen binding site is to refer to the hypervariable loops as described by Chothia. See, e.g., Chothia, D. et al. (1992) J Mol. Biol. 227:799-817; and Tomlinson et al. (1995) EMBO J 14:4628-4638. Still another standard is the AbM definition used by Oxford Molecular's AbM antibody modeling software. See, generally, e.g., Protein Sequence and Structure Analysis ofAntibody Variable Domains. In: Antibody Engineering Lab Manual (Ed.: Duebel, S. and Kontermann, R., Springer-Verlag, Heidelberg). Embodiments described with respect to Kabat CDRs can alternatively be implemented using similar described relationships with respect to Chothia hypervariable loops or to the AbM-defined loops. Another standard for residue numbering that can be used is IMGT (Lefranc et al., Dev & Comp Immunol, 27(1):55-77 (2003).

[0063] The Fab fragment (Fragment antigen-binding) consists of V_{H}-C_{H}1 and V_{L}-C_{L} domains covalently linked by a disulfide bond between the constant regions. The Fᵥ fragment is smaller and consists of V_{H} and V_{L} domains non-covalently linked. To overcome the tendency of non-covalently linked domains to dissociate, a single chain Fᵥ fragment (scFᵥ) can be constructed. The scFᵥ contains a flexible connector, usually a polypeptide, that links (1) the C-terminus of V_{H} to the N-terminus of V_{L}, or (2) the C-terminus of V_{L} to the N-terminus of V_{H}.

[0064] In addition, protein engineering can recombinantly generate variable regions or graft or conjugate variable region sequences on a multi-domain and multi-function protein. Such proteins can have specific antigen binding properties, but are not typically referred to as monoclonal antibodies per se. Protein engineering can also be used to produce recombinant, polyclonal, bispecific, bivalent, multivalent and heteroconjugate antibodies. For example, it is possible to generate a bispecific antibody comprising antigen-binding fragments from two different mAbs that are described in this application, including a bispecific antibody that comprises 1) a first antigen binding fragment of a mAb, as disclosed herein, that binds to a receptor-binding domain of the S1 subunit and a second antigen-binding fragment of a mAb, as disclosed herein, that binds to the N-terminal domain of the S1 subunit; 2) a first antigen binding fragment of a mAb, as disclosed herein, that binds to a receptor-binding domain of the S1 subunit and a second antigen-binding fragment of a mAb, as disclosed herein, that binds to the S2 subunit; 3) a first antigen binding fragment of a mAb, as disclosed herein, that binds to the N-terminal domain of the S1 subunit and a second antigen-binding fragment of a mAb, as disclosed herein, that binds to the S2 subunit; 4) a first antigen binding fragment of a mAb, as disclosed herein, that binds to a receptor-binding domain of the S1 subunit and a second antigen-binding fragment of a mAb, as disclosed herein, that binds to a receptor-binding domain of the S1 subunit, wherein the first and second antigen-binding fragments are from different mAbs; 5) a first antigen binding fragment of a mAb, as disclosed herein, that binds to the N-terminal domain of the S1 subunit and a second antigen-binding fragment of a mAb, as disclosed herein, that binds to the N-terminal domain of the S1 subunit, wherein the first and second antigen-binding fragments are from different mAbs; 6) a first antigen binding fragment of a mAb, as disclosed herein, that binds to the S2 subunit and a second antigen-binding fragment of a mAb, as disclosed herein, that binds to the S2 subunit, wherein the first and second antigen-binding fragments are from different mAbs; 7) a first antigen binding fragment of a mAb, as disclosed herein, that binds to the S1 subunit and a second antigen binding fragment of a mAb, as disclosed herein, that binds to the S1 subunit, wherein the first and second antigen-binding fragments are from different mAbs; or 8) a first antigen binding fragment of a mAb, as disclosed herein, that binds to the S1 subunit and a second antigen binding fragment of a mAb, as disclosed herein, that binds to the S2 subunit.

[0065] . By way of further example, the first antigen-binding fragment binds to a receptor-binding domain of the S1 subunit of SARS-CoV2 and is from one of the following mAbs: COV_2123, COV_2125, or COV_2173, while the second antigen-binding fragment binds to the N-terminal domain of the S1 subunit of SARS-CoV2 and is from one of the following mAbs: COV_2004, COV_2025, or COV_2039.

[0066] It is also possible to modify an antibody to increase productivity and functionality and/or when relevant, to decrease possible immunogenicity. In addition, monoclonal antibodies may be modified at either the DNA sequence level to improve expression by removing hairpins or other secondary structure, by optimizing codon utilization, or at the amino acid level to improve expression or stability. For example, it is possible to remove residues such as unpaired cysteines to reduce aggregation, to alter glycosylation sites, or to substitute residues prone to deamidation or oxidization.

[0067] In some embodiments, an Fc portion of an antibody or antigen-binding fragment described herein is modified to increase its antibody serum-half life in vivo. In some embodiments, an Fc modified antibody or antigen-binding fragment thereof extends its therapeutic and/or protective activity. Such modifications to the Fc region can circumvent the need for frequent administration and/or allow for lower dosing, resulting in improved patient compliance and/or lower costs in comparison to an antibody or antigen-binding fragment thereof with an unmodified Fc region.

[0068] In some embodiments, the Fc modification confers a longer circulation half-life. Typically, the modification relies on improving the interaction between the IgG Fc domain and the neonatal Fc receptor (FcRn), a ubiquitously expressed cellular receptor which binds to internalized IgG at endosomal pH (5.5-6.0), prevents lysosomal degradation and promotes recycling to the extracellular fluid (Roopenian and Akilesh, Nat. Rev. Immunol. 2007 September; 7(9):715-25). Fc engineering for higher FcRn binding affinity at endosomal pH has yielded several Fc mutations capable of improving IgG half-life, as assessed in non-human primates and in human FcRn transgenic mice models.

[0069] For example, the Fc modification may comprise an “LS” or so-called “XTEND™” mutation (M428L/N434S) developed by Xencor Corp. XTEND™ may provide an 11-fold increase in binding at pH 6.0 relative to wild-type IgG1, which is a 4.2-fold improvement in serum half-life in transgenic mice and 3.2-fold in non-human primates. As described in Zalevsky et al., 2010, Nat. Biotechnol., 2010 February; 28(2): 157-159, XTEND™ Fc was tested in xenograft mouse models that express human FcRn as either an anti-VEGF or anti-EGFR IgG₁ antibody, which resulted in extended serum half-life as well as reduced tumor burden relative to those of wild-type IgG₁. As described in Roth et al., 2018, XTEND™ has been adapted to ravulizumab (ALXN1210), resulting in a serum half-life of ˜49.7 days. Ravulizumab was approved by United States Food and Drug Administration on December 2018 for the treatment of paroxysmal nocturnal hemoglobinuria/hemolytic-uremic syndrome (Roth et al., BloodAdv., 2018 Sep. 11; 2(17):2176-2185). XTEND™ has also been adapted to VRC01-LS, which is under clinical evaluation for the prevention of human immunodeficiency virus (Gaudinski et al., PLoS Med. 2018 Jan. 24; 15(1):e1002493).

[0070] It may also be desirable to modify an antibody to improve effector function, e.g., so as to enhance antigen-dependent cell-mediated cytotoxicity (ADCC) and/or complement dependent cytotoxicity (CDC) of the antagonist. One or more amino acid substitutions or the introduction of cysteine in the Fc region may be made, thereby improving internalization capability and/or increased complement-mediated cell killing and ADCC. See Caron et al., J. Ex. Med. 176:1191-1195 (1991) and Shopes, B.J. Immunol. 148:2918-2022 (1992), incorporated herein by reference in their entirety. An antibody fusion protein may be prepared that has dual Fc regions with both enhanced complement lysis and ADCC capabilities. Typical Fc receptors that bind to an Fc region of an antibody (e.g., an IgG antibody) include, but are not limited to, receptors of the FcγRI, FcγRII, and FcγRIII and FcRn subclasses, including allelic variants and alternatively spliced forms of these receptors. Fc receptors are reviewed in Ravetch and Kinet, Annu. Rev. Immunol 9:457-92, 1991; Capel et al., Immunomethods 4:25-34, 1994; and de Haas et al., J Lab. Clin. Med. 126:330-41, 1995). It is also possible to couple or join an antibody to another agent, such as a cytotoxic agent, drug, or therapeutic. In order to avoid possible effects due to antibody dependent enhancement (ADE), the Fc-binding domain of monoclonal antibodies may be mutated to prevent uptake into immune cells. Such mutations include those that abrogate the binding of antibodies to Fcγ receptors, such as LALA (L234A L235A), LALA-PG (L234A L235A P329G), and elimination of the glycosylation site at N297.

[0071] Anti-coronavirus antibodies described in this application may optionally comprise antibody constant regions, such as human constant regions, or parts thereof. For example, a V_{L} domain may be attached at its C-terminal end to a light chain constant domain like C_{κ} or Cλ. Similarly, a V_{H} domain or portion thereof may be attached to all or part of a heavy chain like IgA, IgD, IgE, IgG, and IgM, and any isotype subclass. Constant regions are known in the art (see, for example, Kabat et al., Sequences of Proteins of Immunological Interest, No. 91-3242, National Institutes of Health Publications, Bethesda, MD (1991)).

[0072] In some embodiments, the constant region is a human constant region. Typically, the source of the heavy chain variable domain and the light chain variable domain is different from the source of the human constant region. For example, using recombinant technology, the antibodies of the disclosure can include any human constant region of interest. In this way, the antibodies disclosed herein can be designed to include a human constant region that is different from the human constant region of the antibody obtained from the participants described in the Examples, e.g. participant RV229H.211 or R229H.213.

[0073] The antibodies of this disclosure may be tagged with a detectable or functional label. These labels include radiolabels (e.g., ¹³¹1 or ⁹⁹Tc), enzymatic labels (e.g., horseradish peroxidase or alkaline phosphatase), fluorescent labels, chemiluminescent labels, bioluminescent labels, and other chemical moieties (e.g., streptavidin/biotin, avidin/biotin).

[0074] Anti-Coronavirus Antibodies

[0075] This disclosure provides antibodies, including human, recombinant monoclonal antibodies, that bind to a coronavirus. Some of the antibodies have been shown to bind to SARS—Co-V2 with high affinity, e.g., a dissociation constant (K_{D}) less than 25 pM, with some having even lower K_{D}, including less than 10 pM, less 2 pM or even less than 1 pM. Some of the antibodies have been shown to possess broad cross-reactivity against different coronaviruses. In some embodiments, the present antibodies are capable of binding to one or more of SARS-CoV-1, SARS-CoV-2, Middle East Respiratory Syndrome (MERS)-CoV (MERS-CoV), hCoV-HKU1, hCoV-OC43, hCoV-NL63 and/or hCoV-229E. The variable heavy and light chain regions of the antibodies disclosed herein were sequenced from antibodies that had been isolated from individuals following seasonal coronavirus infection, or infection with SARS-CoV-2. The present monoclonal antibodies may be used to neutralize SARS-CoV-2, bind SARS-CoV-2 with high affinity, or have bind to epitopes on several different coronavirus spike proteins as herein described. The targets of the present antibodies reveal an area of vulnerability on the coronavirus to target in a vaccine. As also herein described, the antibodies of the disclosure may be used therapeutically for prevention or treatment of a disease, such as COVID-19, that is caused by a caused by a coronavirus, such as SARS-CoV-2 or SARS-CoV-1. In some embodiments, the antibodies of the disclosure have capability of being used commercially in antigen-capture SARS-CoV-2 diagnostic assays.

[0076] In some embodiments, the present antibodies bind to the spike (S) protein of a coronavirus, thereby inhibiting viral entry into host cells.

[0077] As depicted in FIG. 1, the S protein of a coronavirus, such as SARS-CoV-1, SARS—Co-V2 and MERS-CoV consists of S1 and S2 subunits. Typically, the receptor-binding domain (RBD) in the S1 subunit first binds the angiotensin-converting enzyme 2 (ACE2) receptor on cells to mediate viral entry via the formation of the RBD-ACE2 complex. The S protein then undergoes a conformational change, leading to membrane fusion mediated by the S2 subunit. The S protein forms a homotrimer and can undergo spontaneous conformational changes with one or more RBDs, switching from a ‘lying down’ position to a ‘standing up’ position to enable receptor binding.

[0078] In some embodiments, the instant antibodies bind to RBD in the S1 subunit. In some embodiments, the antibodies binding to S1 RBD inhibit viral entry into host cells. In some embodiments, the antibodies of the disclosure do not bind to the S1 RBD subunit. In some embodiments, the antibodies of the disclosure bind to the N-terminal domain (NTD) on the S1 subunit or other epitopes on the S1 subunit. In some embodiments, the antibodies of the disclosure bind to the S2 subunit. In some embodiments, the antibodies binding to the S i NTD or the S2 subunit prevent conformational changes of S or inhibit membrane fusion and viral entry.

[0079] In some embodiments, the human, recombinant, monoclonal antibody binds to a coronavirus, such as to the S1 RBD, S1 NTD, S1 subunit, or S2 subunit with a dissociation constant (K_{D}) equal to or less than 500 pM, 250 pM, 200 pM, 150 pM, 100 μM (10⁻¹⁰M), 25 μM, 15 pM, 10 μM (10⁻¹¹M), 2 pM, 1 μM (10⁻¹²M), 0.1 μM (10⁻¹³M), 0.01 μM (10⁻¹⁴M), or 0.001 μM (10⁻¹⁵M). The dissociation constant may be measured using techniques known in the art, such as described in the Examples.

[0080] In some embodiments, the human, monoclonal, recombinant antibody is a neutralizing antibody. Neutralization may be assessed using techniques known in the art, such as described in the Examples.

[0081] In one embodiment, the antibody is an isolated COV_1007 antibody. As used herein, the prefix “COV” “CoV”, followed by a number, is used interchangeably with the prefix “WRAIR.” Accordingly, the term “COV_1007,” “Cov_1007,” “COV-1007,” or WRAIR-1007, for example, refer to the same antibody. All of the antibodies described herein may be interchangeably describes as “COV” or “WRAIR” antibodies.

[0082] “COV_1007” refers to a monoclonal antibody, or antigen-binding fragment thereof, that binds to the S1 NTD of a coronavirus, such as SARS-CoV-2, wherein the antibody comprises 1) a heavy chain variable domain comprising the amino acid sequence of SEQ ID NO:2 and a light chain variable domain comprising the amino acid sequence of SEQ ID NO:7; or 2) a heavy chain variable domain comprising a CDR1 comprising the amino acid sequence of SEQ ID NO:3, a CDR2 comprising the amino acid sequence of SEQ ID NO:4, and a CDR3 comprising the amino acid sequence of SEQ ID NO:5 and a light chain variable domain comprising a CDR1 comprising the amino acid sequence of SEQ ID NO:8, a CDR2 comprising the amino acid sequence of SEQ ID NO:9, and a CDR3 comprising the amino acid sequence of SEQ ID NO:10.

[0083] In one embodiment, the antibody is an isolated COV_1037 antibody. As used herein, the term “COV_1037” refers to a monoclonal antibody, or antigen-binding fragment thereof, that binds to the S1 NTD or S1 RBD domain of a coronavirus, such as SARS-CoV-2, wherein the antibody comprises 1) a heavy chain variable domain comprising the amino acid sequence of SEQ ID NO:12 and a light chain variable domain comprising the amino acid sequence of SEQ ID NO:17; or 2) a heavy chain variable domain comprising a CDR1 comprising the amino acid sequence of SEQ ID NO:13, a CDR2 comprising the amino acid sequence of SEQ ID NO: 14, and a CDR3 comprising the amino acid sequence of SEQ ID NO:15 and a light chain variable domain comprising a CDR1 comprising the amino acid sequence of SEQ ID NO:18, a CDR2 comprising the amino acid sequence of SEQ ID NO:19, and a CDR3 comprising the amino acid sequence of SEQ ID NO:20.

[0084] In one embodiment, the antibody is an isolated COV_1045 antibody. As used herein, the term “COV_1045” refers to a monoclonal antibody, or antigen-binding fragment thereof, that binds to the S2 subunit of a coronavirus, such as SARS-CoV-2, wherein the antibody comprises 1) a heavy chain variable domain comprising the amino acid sequence of SEQ ID NO:22 and a light chain variable domain comprising the amino acid sequence of SEQ ID NO:27; or 2) a heavy chain variable domain comprising a CDR1 comprising the amino acid sequence of SEQ ID NO:23, a CDR2 comprising the amino acid sequence of SEQ ID NO:24, and a CDR3 comprising the amino acid sequence of SEQ ID NO:25 and a light chain variable domain comprising a CDR1 comprising the amino acid sequence of SEQ ID NO:28, a CDR2 comprising the amino acid sequence of SEQ ID NO:29, and a CDR3 comprising the amino acid sequence of SEQ ID NO:30.

[0085] In one embodiment, the antibody is an isolated COV_1046 antibody. As used herein, the term “COV_1046” refers to a monoclonal antibody, or antigen-binding fragment thereof, that binds to the S2 subunit of a coronavirus, such as SARS-CoV-2, wherein the antibody comprises 1) a heavy chain variable domain comprising the amino acid sequence of SEQ ID NO:32 and a light chain variable domain comprising the amino acid sequence of SEQ ID NO: 37; or 2) a heavy chain variable domain comprising a CDR1 comprising the amino acid sequence of SEQ ID NO:33, a CDR2 comprising the amino acid sequence of SEQ ID NO:34, and a CDR3 comprising the amino acid sequence of SEQ ID NO:35 and a light chain variable domain comprising a CDR1 comprising the amino acid sequence of SEQ ID NO:38, a CDR2 comprising the amino acid sequence of SEQ ID NO:39, and a CDR3 comprising the amino acid sequence of SEQ ID NO:40.

[0086] In one embodiment, the antibody is an isolated COV_1201 antibody. As used herein, the term “COV_1201” refers to a monoclonal antibody, or antigen-binding fragment thereof, that binds to the S1 RBD domain of a coronavirus, such as SARS-CoV-2, wherein the antibody comprises 1) a heavy chain variable domain comprising the amino acid sequence of SEQ ID NO:42 and a light chain variable domain comprising the amino acid sequence of SEQ ID NO:47; or 2) a heavy chain variable domain comprising a CDR1 comprising the amino acid sequence of SEQ ID NO:43, a CDR2 comprising the amino acid sequence of SEQ ID NO:44, and a CDR3 comprising the amino acid sequence of SEQ ID NO:45 and a light chain variable domain comprising a CDR1 comprising the amino acid sequence of SEQ ID NO:48, a CDR2 comprising the amino acid sequence of SEQ ID NO:49, and a CDR3 comprising the amino acid sequence of SEQ ID NO:50.

[0087] In one embodiment, the antibody is an isolated COV_2004 antibody. As used herein, the term “COV_2004” refers to a monoclonal antibody, or antigen-binding fragment thereof, that binds to the S1 NTD domain of a coronavirus, such as SARS-CoV-2, wherein the antibody comprises 1) a heavy chain variable domain comprising the amino acid sequence of SEQ ID NO:52 and a light chain variable domain comprising the amino acid sequence of SEQ ID NO:57; 2) a heavy chain variable domain comprising a CDR1 comprising the amino acid sequence of SEQ ID NO:53, a CDR2 comprising the amino acid sequence of SEQ ID NO:54, and a CDR3 comprising the amino acid sequence of SEQ ID NO:55 and a light chain variable domain comprising a CDR1 comprising the amino acid sequence of SEQ ID NO:58, a CDR2 comprising the amino acid sequence of SEQ ID NO:59, and a CDR3 comprising the amino acid sequence of SEQ ID NO:60; or 3) a heavy chain variable domain comprising a CDR1 comprising the amino acid sequence of SEQ ID NO:1109, a CDR2 comprising the amino acid sequence of SEQ ID NO:1139, and a CDR3 comprising the amino acid sequence of SEQ ID NO:1169 and a light chain variable domain comprising a CDR1 comprising the amino acid sequence of SEQ ID NO:1199, a CDR2 comprising the amino acid sequence AAS, and a CDR3 comprising the amino acid sequence of SEQ ID NO:1229.

[0088] In one embodiment, the antibody is an isolated COV_2008 antibody. As used herein, the term “COV_2008” refers to a monoclonal antibody, or antigen-binding fragment thereof, that binds to the S1 NTD domain of a coronavirus, such as SARS-CoV-2, wherein the antibody comprises 1) a heavy chain variable domain comprising the amino acid sequence of SEQ ID NO:62 and a light chain variable domain comprising the amino acid sequence of SEQ ID NO:67; 2) a heavy chain variable domain comprising a CDR1 comprising the amino acid sequence of SEQ ID NO:63, a CDR2 comprising the amino acid sequence of SEQ ID NO:64, and a CDR3 comprising the amino acid sequence of SEQ ID NO:65 and a light chain variable domain comprising a CDR1 comprising the amino acid sequence of SEQ ID NO:68, a CDR2 comprising the amino acid sequence of SEQ ID NO:69, and a CDR3 comprising the amino acid sequence of SEQ ID NO:70; or 3) a heavy chain variable domain comprising a CDR1 comprising the amino acid sequence of SEQ ID NO:1110, a CDR2 comprising the amino acid sequence of SEQ ID NO: 1140, and a CDR3 comprising the amino acid sequence of SEQ ID NO: 1170 and a light chain variable domain comprising a CDR1 comprising the amino acid sequence of SEQ ID NO: 1200, a CDR2 comprising the amino acid sequence KIS, and a CDR3 comprising the amino acid sequence of SEQ ID NO: 1230.

[0089] In one embodiment, the antibody is an isolated COV_2014 antibody. As used herein, the term “COV_2014” refers to a monoclonal antibody, or antigen-binding fragment thereof, that binds to the S1 NTD of a coronavirus, such as SARS-CoV-2, wherein the antibody comprises 1) a heavy chain variable domain comprising the amino acid sequence of SEQ ID NO:72 and a light chain variable domain comprising the amino acid sequence of SEQ ID NO:77; 2) a heavy chain variable domain comprising a CDR1 comprising the amino acid sequence of SEQ ID NO:73, a CDR2 comprising the amino acid sequence of SEQ ID NO:74, and a CDR3 comprising the amino acid sequence of SEQ ID NO:75 and a light chain variable domain comprising a CDR1 comprising the amino acid sequence of SEQ ID NO:78, a CDR2 comprising the amino acid sequence of SEQ ID NO:79, and a CDR3 comprising the amino acid sequence of SEQ ID NO:80; or 3) a heavy chain variable domain comprising a CDR1 comprising the amino acid sequence of SEQ ID NO:1118, a CDR2 comprising the amino acid sequence of SEQ ID NO: 1148, and a CDR3 comprising the amino acid sequence of SEQ ID NO: 1178 and a light chain variable domain comprising a CDR1 comprising the amino acid sequence of SEQ ID NO: 1208, a CDR2 comprising the amino acid sequence AAS, and a CDR3 comprising the amino acid sequence of SEQ ID NO: 1238.

[0090] In one embodiment, the antibody is an isolated COV_2018 antibody. As used herein, the term “COV_2018” refers to a monoclonal antibody, or antigen-binding fragment thereof, that binds to the S1 RBD domain of a coronavirus, such as SARS-CoV-2, wherein the antibody comprises 1) a heavy chain variable domain comprising the amino acid sequence of SEQ ID NO:82 and a light chain variable domain comprising the amino acid sequence of SEQ ID NO:87; 2) a heavy chain variable domain comprising a CDR1 comprising the amino acid sequence of SEQ ID NO:83, a CDR2 comprising the amino acid sequence of SEQ ID NO:84, and a CDR3 comprising the amino acid sequence of SEQ ID NO:85 and a light chain variable domain comprising a CDR1 comprising the amino acid sequence of SEQ ID NO:88, a CDR2 comprising the amino acid sequence of SEQ ID NO:89, and a CDR3 comprising the amino acid sequence of SEQ ID NO:90; or 3) a heavy chain variable domain comprising a CDR1 comprising the amino acid sequence of SEQ ID NO:1130, a CDR2 comprising the amino acid sequence of SEQ ID NO: 1160, and a CDR3 comprising the amino acid sequence of SEQ ID NO: 1190 and a light chain variable domain comprising a CDR1 comprising the amino acid sequence of SEQ ID NO: 1220, a CDR2 comprising the amino acid sequence NAS, and a CDR3 comprising the amino acid sequence of SEQ ID NO: 1250.

[0091] In one embodiment, the antibody is an isolated COV_2024 antibody. As used herein, the term “COV_2024” refers to a monoclonal antibody, or antigen-binding fragment thereof, that binds to the S2 subunit of a coronavirus, such as SARS-CoV-2, wherein the antibody comprises 1) a heavy chain variable domain comprising the amino acid sequence of SEQ ID NO:92 and a light chain variable domain comprising the amino acid sequence of SEQ ID NO:97; or 2) a heavy chain variable domain comprising a CDR1 comprising the amino acid sequence of SEQ ID NO:93, a CDR2 comprising the amino acid sequence of SEQ ID NO:94, and a CDR3 comprising the amino acid sequence of SEQ ID NO:95 and a light chain variable domain comprising a CDR1 comprising the amino acid sequence of SEQ ID NO:98, a CDR2 comprising the amino acid sequence of SEQ ID NO:99, and a CDR3 comprising the amino acid sequence of SEQ ID NO:100.

[0092] In one embodiment, the antibody is an isolated COV_2025 antibody. As used herein, the term “COV_2025” refers to a monoclonal antibody, or antigen-binding fragment thereof, that binds to the S1 NTD domain of a coronavirus, such as SARS-CoV-2, wherein the antibody comprises 1) a heavy chain variable domain comprising the amino acid sequence of SEQ ID NO:102 and a light chain variable domain comprising the amino acid sequence of SEQ ID NO: 107; 2) a heavy chain variable domain comprising a CDR1 comprising the amino acid sequence of SEQ ID NO:103, a CDR2 comprising the amino acid sequence of SEQ ID NO:104, and a CDR3 comprising the amino acid sequence of SEQ ID NO:105 and a light chain variable domain comprising a CDR1 comprising the amino acid sequence of SEQ ID NO:108, a CDR2 comprising the amino acid sequence of SEQ ID NO:109, and a CDR3 comprising the amino acid sequence of SEQ ID NO:110; or 3) a heavy chain variable domain comprising a CDR1 comprising the amino acid sequence of SEQ ID NO:1111, a CDR2 comprising the amino acid sequence of SEQ ID NO: 1141, and a CDR3 comprising the amino acid sequence of SEQ ID NO: 1171 and a light chain variable domain comprising a CDR1 comprising the amino acid sequence of SEQ ID NO: 1201, a CDR2 comprising the amino acid sequence EVT, and a CDR3 comprising the amino acid sequence of SEQ ID NO: 1231.

[0093] In one embodiment, the antibody is an isolated COV_2027 antibody. As used herein, the term “COV_2027” refers to a monoclonal antibody, or antigen-binding fragment thereof, that binds to the S1 RBD domain of a coronavirus, such as SARS-CoV-2, wherein the antibody comprises 1) a heavy chain variable domain comprising the amino acid sequence of SEQ ID NO:112 and a light chain variable domain comprising the amino acid sequence of SEQ ID NO: 117; 2) a heavy chain variable domain comprising a CDR1 comprising the amino acid sequence of SEQ ID NO:113, a CDR2 comprising the amino acid sequence of SEQ ID NO:114, and a CDR3 comprising the amino acid sequence of SEQ ID NO:115 and a light chain variable domain comprising a CDR1 comprising the amino acid sequence of SEQ ID NO:118, a CDR2 comprising the amino acid sequence of SEQ ID NO:119, and a CDR3 comprising the amino acid sequence of SEQ ID NO:120 or 3) a heavy chain variable domain comprising a CDR1 comprising the amino acid sequence of SEQ ID NO:1123, a CDR2 comprising the amino acid sequence of SEQ ID NO: 1153, and a CDR3 comprising the amino acid sequence of SEQ ID NO: 1183 and a light chain variable domain comprising a CDR1 comprising the amino acid sequence of SEQ ID NO: 1213, a CDR2 comprising the amino acid sequence GAS, and a CDR3 comprising the amino acid sequence of SEQ ID NO: 1243.

[0094] In one embodiment, the antibody is an isolated COV_2028 antibody. As used herein, the term “COV_2028” refers to a monoclonal antibody, or antigen-binding fragment thereof, that binds to the S1 NTD domain of a coronavirus, such as SARS-CoV-2, wherein the antibody comprises 1) a heavy chain variable domain comprising the amino acid sequence of SEQ ID NO:122 and a light chain variable domain comprising the amino acid sequence of SEQ ID NO: 127; 2) a heavy chain variable domain comprising a CDR1 comprising the amino acid sequence of SEQ ID NO:123, a CDR2 comprising the amino acid sequence of SEQ ID NO:124, and a CDR3 comprising the amino acid sequence of SEQ ID NO:125 and a light chain variable domain comprising a CDR1 comprising the amino acid sequence of SEQ ID NO:128, a CDR2 comprising the amino acid sequence of SEQ ID NO:129, and a CDR3 comprising the amino acid sequence of SEQ ID NO:130; or 3) a heavy chain variable domain comprising a CDR1 comprising the amino acid sequence of SEQ ID NO:1116, a CDR2 comprising the amino acid sequence of SEQ ID NO: 1146, and a CDR3 comprising the amino acid sequence of SEQ ID NO: 1176 and a light chain variable domain comprising a CDR1 comprising the amino acid sequence of SEQ ID NO: 1206, a CDR2 comprising the amino acid sequence EVS, and a CDR3 comprising the amino acid sequence of SEQ ID NO: 1236.

[0095] In one embodiment, the antibody is an isolated COV_2035 antibody. As used herein, the term “COV_2035” refers to a monoclonal antibody, or antigen-binding fragment thereof, that binds to the S1 NTD domain of a coronavirus, such as SARS-CoV-2, wherein the antibody comprises 1) a heavy chain variable domain comprising the amino acid sequence of SEQ ID NO:132 and a light chain variable domain comprising the amino acid sequence of SEQ ID NO: 137; 2) a heavy chain variable domain comprising a CDR1 comprising the amino acid sequence of SEQ ID NO:133, a CDR2 comprising the amino acid sequence of SEQ ID NO:134, and a CDR3 comprising the amino acid sequence of SEQ ID NO:135 and a light chain variable domain comprising a CDR1 comprising the amino acid sequence of SEQ ID NO:138, a CDR2 comprising the amino acid sequence of SEQ ID NO:139, and a CDR3 comprising the amino acid sequence of SEQ ID NO: 140; or 3) a heavy chain variable domain comprising a CDR1 comprising the amino acid sequence of SEQ ID NO:1112, a CDR2 comprising the amino acid sequence of SEQ ID NO: 1142, and a CDR3 comprising the amino acid sequence of SEQ ID NO: 1172 and a light chain variable domain comprising a CDR1 comprising the amino acid sequence of SEQ ID NO: 1202, a CDR2 comprising the amino acid sequence EVS, and a CDR3 comprising the amino acid sequence of SEQ ID NO: 1232.

[0096] In one embodiment, the antibody is an isolated COV_2037 antibody. As used herein, the term “COV_2037” refers to a monoclonal antibody, or antigen-binding fragment thereof, that binds to the S1 NTD domain of a coronavirus, such as SARS-CoV-2, wherein the antibody comprises 1) a heavy chain variable domain comprising the amino acid sequence of SEQ ID NO: 142 and a light chain variable domain comprising the amino acid sequence of SEQ ID NO: 147; 2) a heavy chain variable domain comprising a CDR1 comprising the amino acid sequence of SEQ ID NO:143, a CDR2 comprising the amino acid sequence of SEQ ID NO:144, and a CDR3 comprising the amino acid sequence of SEQ ID NO:145 and a light chain variable domain comprising a CDR1 comprising the amino acid sequence of SEQ ID NO:148, a CDR2 comprising the amino acid sequence of SEQ ID NO:149, and a CDR3 comprising the amino acid sequence of SEQ ID NO:150; or 3) a heavy chain variable domain comprising a CDR1 comprising the amino acid sequence of SEQ ID NO:1113, a CDR2 comprising the amino acid sequence of SEQ ID NO: 1143, and a CDR3 comprising the amino acid sequence of SEQ ID NO: 1173 and a light chain variable domain comprising a CDR1 comprising the amino acid sequence of SEQ ID NO: 1203, a CDR2 comprising the amino acid sequence KIS, and a CDR3 comprising the amino acid sequence of SEQ ID NO: 1233.

[0097] In one embodiment, the antibody is an isolated COV_2039 antibody. As used herein, the term “COV_2039” refers to a monoclonal antibody, or antigen-binding fragment thereof, that binds to the S1 NTD domain of a coronavirus, such as SARS-CoV-2, wherein the antibody comprises 1) a heavy chain variable domain comprising the amino acid sequence of SEQ ID NO:152 and a light chain variable domain comprising the amino acid sequence of SEQ ID NO: 157; 2) a heavy chain variable domain comprising a CDR1 comprising the amino acid sequence of SEQ ID NO:153, a CDR2 comprising the amino acid sequence of SEQ ID NO:154, and a CDR3 comprising the amino acid sequence of SEQ ID NO:155 and a light chain variable domain comprising a CDR1 comprising the amino acid sequence of SEQ ID NO:158, a CDR2 comprising the amino acid sequence of SEQ ID NO:159, and a CDR3 comprising the amino acid sequence of SEQ ID NO:160; or 3) wherein the antibody comprises a heavy chain variable domain comprising a CDR1 comprising the amino acid sequence of SEQ ID NO:1114, a CDR2 comprising the amino acid sequence of SEQ ID NO: 1144, and a CDR3 comprising the amino acid sequence of SEQ ID NO: 1174 and a light chain variable domain comprising a CDR1 comprising the amino acid sequence of SEQ ID NO: 1204, a CDR2 comprising the amino acid sequence ANS, and a CDR3 comprising the amino acid sequence of SEQ ID NO: 1234.

[0098] In one embodiment, the antibody is an isolated COV_2054 antibody. As used herein, the term “COV_2054” refers to a monoclonal antibody, or antigen-binding fragment thereof, that binds to the S1 NTD domain of a coronavirus, such as SARS-CoV-2, wherein the antibody comprises 1) a heavy chain variable domain comprising the amino acid sequence of SEQ ID NO:162 and a light chain variable domain comprising the amino acid sequence of SEQ ID NO: 167; 2) a heavy chain variable domain comprising a CDR1 comprising the amino acid sequence of SEQ ID NO:163, a CDR2 comprising the amino acid sequence of SEQ ID NO:164, and a CDR3 comprising the amino acid sequence of SEQ ID NO:165 and a light chain variable domain comprising a CDR1 comprising the amino acid sequence of SEQ ID NO:168, a CDR2 comprising the amino acid sequence of SEQ ID NO:169, and a CDR3 comprising the amino acid sequence of SEQ ID NO:170; 3) a heavy chain variable domain comprising a CDR1 comprising the amino acid sequence of SEQ ID NO:1120, a CDR2 comprising the amino acid sequence of SEQ ID NO: 1150, and a CDR3 comprising the amino acid sequence of SEQ ID NO: 1180 and a light chain variable domain comprising a CDR1 comprising the amino acid sequence of SEQ ID NO: 1210, a CDR2 comprising the amino acid sequence EAS, and a CDR3 comprising the amino acid sequence of SEQ ID NO: 1240.

[0099] In one embodiment, the antibody is an isolated COV_2056 antibody. As used herein, the term “COV_2056” refers to a monoclonal antibody, or antigen-binding fragment thereof, that binds to the S1 RBD domain of a coronavirus, such as SARS-CoV-2, wherein the antibody comprises 1) a heavy chain variable domain comprising the amino acid sequence of SEQ ID NO:432 and a light chain variable domain comprising the amino acid sequence of SEQ ID NO:437; 2) a heavy chain variable domain comprising a CDR1 comprising the amino acid sequence of SEQ ID NO:433, a CDR2 comprising the amino acid sequence of SEQ ID NO:434, and a CDR3 comprising the amino acid sequence of SEQ ID NO:435 and a light chain variable domain comprising a CDR1 comprising the amino acid sequence of SEQ ID NO:438, a CDR2 comprising the amino acid sequence of SEQ ID NO:439, and a CDR3 comprising the amino acid sequence of SEQ ID NO:440; or 3) a heavy chain variable domain comprising a CDR1 comprising the amino acid sequence of SEQ ID NO:1131, a CDR2 comprising the amino acid sequence of SEQ ID NO: 1161, and a CDR3 comprising the amino acid sequence of SEQ ID NO: 1191 and a light chain variable domain comprising a CDR1 comprising the amino acid sequence of SEQ ID NO: 1221, a CDR2 comprising the amino acid sequence AAS, and a CDR3 comprising the amino acid sequence of SEQ ID NO: 1251.

[0100] In one embodiment, the antibody is an isolated COV_2057 antibody. As used herein, the term “COV_2057” refers to a monoclonal antibody, or antigen-binding fragment thereof, that binds to the S1 RBD domain of a coronavirus, such as SARS-CoV-2, wherein the antibody comprises 1) a heavy chain variable domain comprising the amino acid sequence of SEQ ID NO: 172 and a light chain variable domain comprising the amino acid sequence of SEQ ID NO: 177; 2) a heavy chain variable domain comprising a CDR1 comprising the amino acid sequence of SEQ ID NO:173, a CDR2 comprising the amino acid sequence of SEQ ID NO:174, and a CDR3 comprising the amino acid sequence of SEQ ID NO:175 and a light chain variable domain comprising a CDR1 comprising the amino acid sequence of SEQ ID NO:178, a CDR2 comprising the amino acid sequence of SEQ ID NO:179, and a CDR3 comprising the amino acid sequence of SEQ ID NO: 180; or 3) a heavy chain variable domain comprising a CDR1 comprising the amino acid sequence of SEQ ID NO:1132, a CDR2 comprising the amino acid sequence of SEQ ID NO: 1162, and a CDR3 comprising the amino acid sequence of SEQ ID NO: 1192 and a light chain variable domain comprising a CDR1 comprising the amino acid sequence of SEQ ID NO: 1222, a CDR2 comprising the amino acid sequence AAS, and a CDR3 comprising the amino acid sequence of SEQ ID NO: 1252.

[0101] In one embodiment, the antibody is an isolated COV_2063 antibody. As used herein, the term “COV_2063” refers to a monoclonal antibody, or antigen-binding fragment thereof, that binds to the S1 RBD domain of a coronavirus, such as SARS-CoV-2, wherein the antibody comprises 1) a heavy chain variable domain comprising the amino acid sequence of SEQ ID NO:182 and a light chain variable domain comprising the amino acid sequence of SEQ ID NO: 187; 2) a heavy chain variable domain comprising a CDR1 comprising the amino acid sequence of SEQ ID NO:183, a CDR2 comprising the amino acid sequence of SEQ ID NO:184, and a CDR3 comprising the amino acid sequence of SEQ ID NO:185 and a light chain variable domain comprising a CDR1 comprising the amino acid sequence of SEQ ID NO:188, a CDR2 comprising the amino acid sequence of SEQ ID NO:189, and a CDR3 comprising the amino acid sequence of SEQ ID NO: 190; or 3) a heavy chain variable domain comprising a CDR1 comprising the amino acid sequence of SEQ ID NO:1133, a CDR2 comprising the amino acid sequence of SEQ ID NO: 1163, and a CDR3 comprising the amino acid sequence of SEQ ID NO: 1193 and a light chain variable domain comprising a CDR1 comprising the amino acid sequence of SEQ ID NO: 1223, a CDR2 comprising the amino acid sequence KVS, and a CDR3 comprising the amino acid sequence of SEQ ID NO: 1253.

[0102] In one embodiment, the antibody is an isolated COV_2091 antibody. As used herein, the term “COV_2091” refers to a monoclonal antibody, or antigen-binding fragment thereof, that binds to the S1 RBD domain of a coronavirus, such as SARS-CoV-2, wherein the antibody comprises 1) a heavy chain variable domain comprising the amino acid sequence of SEQ ID NO:192 and a light chain variable domain comprising the amino acid sequence of SEQ ID NO: 197; 2) a heavy chain variable domain comprising a CDR1 comprising the amino acid sequence of SEQ ID NO:193, a CDR2 comprising the amino acid sequence of SEQ ID NO:194, and a CDR3 comprising the amino acid sequence of SEQ ID NO:195 and a light chain variable domain comprising a CDR1 comprising the amino acid sequence of SEQ ID NO:198, a CDR2 comprising the amino acid sequence of SEQ ID NO:199, and a CDR3 comprising the amino acid sequence of SEQ ID NO:200; or 3) a heavy chain variable domain comprising a CDR1 comprising the amino acid sequence of SEQ ID NO:1134, a CDR2 comprising the amino acid sequence of SEQ ID NO: 1164, and a CDR3 comprising the amino acid sequence of SEQ ID NO: 1194 and a light chain variable domain comprising a CDR1 comprising the amino acid sequence of SEQ ID NO: 1224, a CDR2 comprising the amino acid sequence AAS, and a CDR3 comprising the amino acid sequence of SEQ ID NO: 1254.

[0103] In one embodiment, the antibody is an isolated COV_2100 antibody. As used herein, the term “COV_2100” refers to a monoclonal antibody, or antigen-binding fragment thereof, that binds to the S1 RBD domain of a coronavirus, such as SARS-CoV-2, wherein the antibody comprises 1) a heavy chain variable domain comprising the amino acid sequence of SEQ ID NO:202 and a light chain variable domain comprising the amino acid sequence of SEQ ID NO:207; 2) a heavy chain variable domain comprising a CDR1 comprising the amino acid sequence of SEQ ID NO:203, a CDR2 comprising the amino acid sequence of SEQ ID NO:204, and a CDR3 comprising the amino acid sequence of SEQ ID NO:205 and a light chain variable domain comprising a CDR1 comprising the amino acid sequence of SEQ ID NO:208, a CDR2 comprising the amino acid sequence of SEQ ID NO:209, and a CDR3 comprising the amino acid sequence of SEQ ID NO:210; or 3) a heavy chain variable domain comprising a CDR1 comprising the amino acid sequence of SEQ ID NO:1136, a CDR2 comprising the amino acid sequence of SEQ ID NO: 1166, and a CDR3 comprising the amino acid sequence of SEQ ID NO: 1196 and a light chain variable domain comprising a CDR1 comprising the amino acid sequence of SEQ ID NO: 1226, a CDR2 comprising the amino acid sequence AAS, and a CDR3 comprising the amino acid sequence of SEQ ID NO: 1256.

[0104] In one embodiment, the antibody is an isolated COV_2103 antibody. As used herein, the term “COV_2103” refers to a monoclonal antibody, or antigen-binding fragment thereof, that binds to the S1 NTD domain of a coronavirus, such as SARS-CoV-2, wherein the antibody comprises 1) a heavy chain variable domain comprising the amino acid sequence of SEQ ID NO:212 and a light chain variable domain comprising the amino acid sequence of SEQ ID NO:217; 2) a heavy chain variable domain comprising a CDR1 comprising the amino acid sequence of SEQ ID NO:213, a CDR2 comprising the amino acid sequence of SEQ ID NO:214, and a CDR3 comprising the amino acid sequence of SEQ ID NO:215 and a light chain variable domain comprising a CDR1 comprising the amino acid sequence of SEQ ID NO:218, a CDR2 comprising the amino acid sequence of SEQ ID NO:219, and a CDR3 comprising the amino acid sequence of SEQ ID NO:220; or 3) a heavy chain variable domain comprising a CDR1 comprising the amino acid sequence of SEQ ID NO:1121, a CDR2 comprising the amino acid sequence of SEQ ID NO: 1151, and a CDR3 comprising the amino acid sequence of SEQ ID NO: 1181 and a light chain variable domain comprising a CDR1 comprising the amino acid sequence of SEQ ID NO: 1211, a CDR2 comprising the amino acid sequence KAS, and a CDR3 comprising the amino acid sequence of SEQ ID NO: 1241.

[0105] In one embodiment, the antibody is an isolated COV_2108 antibody. As used herein, the term “COV_2108” refers to a monoclonal antibody, or antigen-binding fragment thereof, that binds to the S1 RBD domain of a coronavirus, such as SARS-CoV-2, wherein the antibody comprises 1) a heavy chain variable domain comprising the amino acid sequence of SEQ ID NO:222 and a light chain variable domain comprising the amino acid sequence of SEQ ID NO:227; 2) a heavy chain variable domain comprising a CDR1 comprising the amino acid sequence of SEQ ID NO:223, a CDR2 comprising the amino acid sequence of SEQ ID NO:224, and a CDR3 comprising the amino acid sequence of SEQ ID NO:225 and a light chain variable domain comprising a CDR1 comprising the amino acid sequence of SEQ ID NO:228, a CDR2 comprising the amino acid sequence of SEQ ID NO:229, and a CDR3 comprising the amino acid sequence of SEQ ID NO:230; or 3) a heavy chain variable domain comprising a CDR1 comprising the amino acid sequence of SEQ ID NO:1137, a CDR2 comprising the amino acid sequence of SEQ ID NO: 1167, and a CDR3 comprising the amino acid sequence of SEQ ID NO: 1197 and a light chain variable domain comprising a CDR1 comprising the amino acid sequence of SEQ ID NO: 1227, a CDR2 comprising the amino acid sequence TTS, and a CDR3 comprising the amino acid sequence of SEQ ID NO: 1257.

[0106] In one embodiment, the antibody is an isolated COV_2123 antibody. As used herein, the term “COV_2123” refers to a monoclonal antibody, or antigen-binding fragment thereof, that binds to the S1 RBD domain of a coronavirus, such as SARS-CoV-2, wherein the antibody comprises 1) a heavy chain variable domain comprising the amino acid sequence of SEQ ID NO:232 and a light chain variable domain comprising the amino acid sequence of SEQ ID NO:237; 2) a heavy chain variable domain comprising a CDR1 comprising the amino acid sequence of SEQ ID NO:233, a CDR2 comprising the amino acid sequence of SEQ ID NO:234, and a CDR3 comprising the amino acid sequence of SEQ ID NO:235 and a light chain variable domain comprising a CDR1 comprising the amino acid sequence of SEQ ID NO:238, a CDR2 comprising the amino acid sequence of SEQ ID NO:239, and a CDR3 comprising the amino acid sequence of SEQ ID NO:240 or 3) a heavy chain variable domain comprising a CDR1 comprising the amino acid sequence of SEQ ID NO:1124, a CDR2 comprising the amino acid sequence of SEQ ID NO: 1154, and a CDR3 comprising the amino acid sequence of SEQ ID NO: 1184 and a light chain variable domain comprising a CDR1 comprising the amino acid sequence of SEQ ID NO: 1214, a CDR2 comprising the amino acid sequence DAS, and a CDR3 comprising the amino acid sequence of SEQ ID NO: 1244.

[0107] In one embodiment, the antibody is an isolated COV_2125 antibody. As used herein, the term “COV_2125” refers to a monoclonal antibody, or antigen-binding fragment thereof, that binds to the S1 RBD domain of a coronavirus, such as SARS-CoV-2, wherein the antibody comprises 1) a heavy chain variable domain comprising the amino acid sequence of SEQ ID NO:242 and a light chain variable domain comprising the amino acid sequence of SEQ ID NO:247; 2) a heavy chain variable domain comprising a CDR1 comprising the amino acid sequence of SEQ ID NO:243, a CDR2 comprising the amino acid sequence of SEQ ID NO:244, and a CDR3 comprising the amino acid sequence of SEQ ID NO:245 and a light chain variable domain comprising a CDR1 comprising the amino acid sequence of SEQ ID NO:248, a CDR2 comprising the amino acid sequence of SEQ ID NO:249, and a CDR3 comprising the amino acid sequence of SEQ ID NO:250; or 3) a heavy chain variable domain comprising a CDR1 comprising the amino acid sequence of SEQ ID NO:1125, a CDR2 comprising the amino acid sequence of SEQ ID NO: 1155, and a CDR3 comprising the amino acid sequence of SEQ ID NO: 1185 and a light chain variable domain comprising a CDR1 comprising the amino acid sequence of SEQ ID NO: 1215, a CDR2 comprising the amino acid sequence AAS, and a CDR3 comprising the amino acid sequence of SEQ ID NO: 1245.

[0108] In one embodiment, the antibody is an isolated COV_2134 antibody. As used herein, the term “COV_2134” refers to a monoclonal antibody, or antigen-binding fragment thereof, that binds to the S1 RBD domain of a coronavirus, such as SARS-CoV-2, wherein the antibody comprises 1) a heavy chain variable domain comprising the amino acid sequence of SEQ ID NO:252 and a light chain variable domain comprising the amino acid sequence of SEQ ID NO:257; 2) a heavy chain variable domain comprising a CDR1 comprising the amino acid sequence of SEQ ID NO:253, a CDR2 comprising the amino acid sequence of SEQ ID NO:254, and a CDR3 comprising the amino acid sequence of SEQ ID NO:255 and a light chain variable domain comprising a CDR1 comprising the amino acid sequence of SEQ ID NO:258, a CDR2 comprising the amino acid sequence of SEQ ID NO:259, and a CDR3 comprising the amino acid sequence of SEQ ID NO:260; or a heavy chain variable domain comprising a CDR1 comprising the amino acid sequence of SEQ ID NO:1135, a CDR2 comprising the amino acid sequence of SEQ ID NO: 1165, and a CDR3 comprising the amino acid sequence of SEQ ID NO: 1195 and a light chain variable domain comprising a CDR1 comprising the amino acid sequence of SEQ ID NO: 1225, a CDR2 comprising the amino acid sequence QDS, and a CDR3 comprising the amino acid sequence of SEQ ID NO: 1255.

[0109] In one embodiment, the antibody is an isolated COV_2151 antibody. As used herein, the term “COV_2151” refers to a monoclonal antibody, or antigen-binding fragment thereof, that binds to the S1 RBD domain of a coronavirus, such as the RBD domain, such as the RBD domain of SARS-CoV-2, wherein the antibody comprises 1) a heavy chain variable domain comprising the amino acid sequence of SEQ ID NO:262 and a light chain variable domain comprising the amino acid sequence of SEQ ID NO:267; 2) a heavy chain variable domain comprising a CDR1 comprising the amino acid sequence of SEQ ID NO:263, a CDR2 comprising the amino acid sequence of SEQ ID NO:264, and a CDR3 comprising the amino acid sequence of SEQ ID NO:265 and a light chain variable domain comprising a CDR1 comprising the amino acid sequence of SEQ ID NO:268, a CDR2 comprising the amino acid sequence of SEQ ID NO:269, and a CDR3 comprising the amino acid sequence of SEQ ID NO:270; or 3) a heavy chain variable domain comprising a CDR1 comprising the amino acid sequence of SEQ ID NO:1138, a CDR2 comprising the amino acid sequence of SEQ ID NO: 1168, and a CDR3 comprising the amino acid sequence of SEQ ID NO: 1198 and a light chain variable domain comprising a CDR1 comprising the amino acid sequence of SEQ ID NO: 1228, a CDR2 comprising the amino acid sequence EDN, and a CDR3 comprising the amino acid sequence of SEQ ID NO: 1258.

[0110] In one embodiment, the antibody is an isolated COV_2165 antibody. As used herein, the term “COV_2165” refers to a monoclonal antibody, or antigen-binding fragment thereof, that binds to the S1 RBD domain of a coronavirus, such as SARS-CoV-2, wherein the antibody comprises 1) a heavy chain variable domain comprising the amino acid sequence of SEQ ID NO:272 and a light chain variable domain comprising the amino acid sequence of SEQ ID NO:277; 2) a heavy chain variable domain comprising a CDR1 comprising the amino acid sequence of SEQ ID NO:273, a CDR2 comprising the amino acid sequence of SEQ ID NO:274, and a CDR3 comprising the amino acid sequence of SEQ ID NO:275 and a light chain variable domain comprising a CDR1 comprising the amino acid sequence of SEQ ID NO:278, a CDR2 comprising the amino acid sequence of SEQ ID NO:279, and a CDR3 comprising the amino acid sequence of SEQ ID NO:280; or 3) a heavy chain variable domain comprising a CDR1 comprising the amino acid sequence of SEQ ID NO:1126, a CDR2 comprising the amino acid sequence of SEQ ID NO: 1156, and a CDR3 comprising the amino acid sequence of SEQ ID NO: 1186 and a light chain variable domain comprising a CDR1 comprising the amino acid sequence of SEQ ID NO: 1216, a CDR2 comprising the amino acid sequence DAS, and a CDR3 comprising the amino acid sequence of SEQ ID NO: 1246.

[0111] In one embodiment, the antibody is an isolated COV_2172 antibody. As used herein, the term “COV_2172” refers to a monoclonal antibody, or antigen-binding fragment thereof, that binds to the S1 RBD domain of a coronavirus, such as SARS-CoV-2, wherein the antibody comprises 1) a heavy chain variable domain comprising the amino acid sequence of SEQ ID NO:442 and a light chain variable domain comprising the amino acid sequence of SEQ ID NO:447; 2) a heavy chain variable domain comprising a CDR1 comprising the amino acid sequence of SEQ ID NO:443, a CDR2 comprising the amino acid sequence of SEQ ID NO:444, and a CDR3 comprising the amino acid sequence of SEQ ID NO:445 and a light chain variable domain comprising a CDR1 comprising the amino acid sequence of SEQ ID NO:448, a CDR2 comprising the amino acid sequence of SEQ ID NO:449, and a CDR3 comprising the amino acid sequence of SEQ ID NO:450; or 3) a heavy chain variable domain comprising a CDR1 comprising the amino acid sequence of SEQ ID NO:1127, a CDR2 comprising the amino acid sequence of SEQ ID NO: 1157, and a CDR3 comprising the amino acid sequence of SEQ ID NO: 1187 and a light chain variable domain comprising a CDR1 comprising the amino acid sequence of SEQ ID NO: 1217, a CDR2 comprising the amino acid sequence DVS, and a CDR3 comprising the amino acid sequence of SEQ ID NO: 1247.

[0112] In one embodiment, the antibody is an isolated COV_2173 antibody. As used herein, the term “COV_2173” refers to a monoclonal antibody, or antigen-binding fragment thereof, that binds to the S1 RBD domain of a coronavirus, such as SARS-CoV-2, wherein the antibody comprises 1) a heavy chain variable domain comprising the amino acid sequence of SEQ ID NO:282 and a light chain variable domain comprising the amino acid sequence of SEQ ID NO:287; 2) a heavy chain variable domain comprising a CDR1 comprising the amino acid sequence of SEQ ID NO:283, a CDR2 comprising the amino acid sequence of SEQ ID NO:284, and a CDR3 comprising the amino acid sequence of SEQ ID NO:285 and a light chain variable domain comprising a CDR1 comprising the amino acid sequence of SEQ ID NO:288, a CDR2 comprising the amino acid sequence of SEQ ID NO:289, and a CDR3 comprising the amino acid sequence of SEQ ID NO:290; or 3) a heavy chain variable domain comprising a CDR1 comprising the amino acid sequence of SEQ ID NO:1128, a CDR2 comprising the amino acid sequence of SEQ ID NO: 1158, and a CDR3 comprising the amino acid sequence of SEQ ID NO: 1188 and a light chain variable domain comprising a CDR1 comprising the amino acid sequence of SEQ ID NO: 1218, a CDR2 comprising the amino acid sequence GNN, and a CDR3 comprising the amino acid sequence of SEQ ID NO: 1248.

[0113] In one embodiment, the antibody is an isolated COV_2193 antibody. As used herein, the term “COV_2193” refers to a monoclonal antibody, or antigen-binding fragment thereof, that binds to the S1 NTD domain of a coronavirus, such as SARS-CoV-2, wherein the antibody comprises 1) a heavy chain variable domain comprising the amino acid sequence of SEQ ID NO: 292 and a light chain variable domain comprising the amino acid sequence of SEQ ID NO:297; 2) a heavy chain variable domain comprising a CDR1 comprising the amino acid sequence of SEQ ID NO:293, a CDR2 comprising the amino acid sequence of SEQ ID NO:294, and a CDR3 comprising the amino acid sequence of SEQ ID NO:295 and a light chain variable domain comprising a CDR1 comprising the amino acid sequence of SEQ ID NO:298, a CDR2 comprising the amino acid sequence of SEQ ID NO:299, and a CDR3 comprising the amino acid sequence of SEQ ID NO:300; o 3) a heavy chain variable domain comprising a CDR1 comprising the amino acid sequence of SEQ ID NO:1122, a CDR2 comprising the amino acid sequence of SEQ ID NO: 1152, and a CDR3 comprising the amino acid sequence of SEQ ID NO: 1182 and a light chain variable domain comprising a CDR1 comprising the amino acid sequence of SEQ ID NO: 1212, a CDR2 comprising the amino acid sequence LKN, and a CDR3 comprising the amino acid sequence of SEQ ID NO: 1242.

[0114] In one embodiment, the antibody is an isolated COV_2196 antibody. As used herein, the term “COV_2196” refers to a monoclonal antibody, or antigen-binding fragment thereof, that binds to S1 NTD domain of a coronavirus, such as SARS-CoV-2, wherein the antibody comprises 1) a heavy chain variable domain comprising the amino acid sequence of SEQ ID NO:302 and a light chain variable domain comprising the amino acid sequence of SEQ ID NO:307; 2) a heavy chain variable domain comprising a CDR1 comprising the amino acid sequence of SEQ ID NO:303, a CDR2 comprising the amino acid sequence of SEQ ID NO:304, and a CDR3 comprising the amino acid sequence of SEQ ID NO:305 and a light chain variable domain comprising a CDR1 comprising the amino acid sequence of SEQ ID NO:308, a CDR2 comprising the amino acid sequence of SEQ ID NO:309, and a CDR3 comprising the amino acid sequence of SEQ ID NO:310; or 3) a heavy chain variable domain comprising a CDR1 comprising the amino acid sequence of SEQ ID NO:1115, a CDR2 comprising the amino acid sequence of SEQ ID NO: 1145, and a CDR3 comprising the amino acid sequence of SEQ ID NO: 1175 and a light chain variable domain comprising a CDR1 comprising the amino acid sequence of SEQ ID NO: 1205, a CDR2 comprising the amino acid sequence KDT, and a CDR3 comprising the amino acid sequence of SEQ ID NO: 1235.

[0115] In one embodiment, the antibody is an isolated COV_3000 antibody. As used herein, the term “COV_3000” refers to a monoclonal antibody, or antigen-binding fragment thereof, that binds to the S2 subunit of a coronavirus, such as SARS-CoV-2, wherein the antibody comprises 1) a heavy chain variable domain comprising the amino acid sequence of SEQ ID NO:312 and a light chain variable domain comprising the amino acid sequence of SEQ ID NO:317; or 2) a heavy chain variable domain comprising a CDR1 comprising the amino acid sequence of SEQ ID NO:313, a CDR2 comprising the amino acid sequence of SEQ ID NO:314, and a CDR3 comprising the amino acid sequence of SEQ ID NO:315 and alight chain variable domain comprising a CDR1 comprising the amino acid sequence of SEQ ID NO:318, a CDR2 comprising the amino acid sequence of SEQ ID NO:319, and a CDR3 comprising the amino acid sequence of SEQ ID NO:320.

[0116] In one embodiment, the antibody is an isolated COV_3005 antibody. As used herein, the term “COV_3005” refers to a monoclonal antibody, or antigen-binding fragment thereof, that binds to the S2 subunit of a coronavirus, such as SARS-CoV-2, wherein the antibody comprises 1) a heavy chain variable domain comprising the amino acid sequence of SEQ ID NO:322 and a light chain variable domain comprising the amino acid sequence of SEQ ID NO:327; or 2) a heavy chain variable domain comprising a CDR1 comprising the amino acid sequence of SEQ ID NO:323, a CDR2 comprising the amino acid sequence of SEQ ID NO:324, and a CDR3 comprising the amino acid sequence of SEQ ID NO:325 and alight chain variable domain comprising a CDR1 comprising the amino acid sequence of SEQ ID NO:328, a CDR2 comprising the amino acid sequence of SEQ ID NO:329, and a CDR3 comprising the amino acid sequence of SEQ ID NO:330.

[0117] In one embodiment, the antibody is an isolated COV_3013 antibody. As used herein, the term “COV_3013” refers to a monoclonal antibody, or antigen-binding fragment thereof, that binds to the S2 subunit of a coronavirus, such as SARS-CoV-2, wherein the antibody comprises 1) a heavy chain variable domain comprising the amino acid sequence of SEQ ID NO:332 and a light chain variable domain comprising the amino acid sequence of SEQ ID NO:337; or 2) a heavy chain variable domain comprising a CDR1 comprising the amino acid sequence of SEQ ID NO:333, a CDR2 comprising the amino acid sequence of SEQ ID NO:334, and a CDR3 comprising the amino acid sequence of SEQ ID NO:335 and alight chain variable domain comprising a CDR1 comprising the amino acid sequence of SEQ ID NO:338, a CDR2 comprising the amino acid sequence of SEQ ID NO:339, and a CDR3 comprising the amino acid sequence of SEQ ID NO:340.

[0118] In one embodiment, the antibody is an isolated COV_3019 antibody. As used herein, the term “COV_3019” refers to a monoclonal antibody, or antigen-binding fragment thereof, that binds to the S2 subunit of a coronavirus, such as SARS-CoV-2, wherein the antibody comprises 1) a heavy chain variable domain comprising the amino acid sequence of SEQ ID NO:342 and a light chain variable domain comprising the amino acid sequence of SEQ ID NO:347; or 2) a heavy chain variable domain comprising a CDR1 comprising the amino acid sequence of SEQ ID NO:343, a CDR2 comprising the amino acid sequence of SEQ ID NO:344, and a CDR3 comprising the amino acid sequence of SEQ ID NO:345 and alight chain variable domain comprising a CDR1 comprising the amino acid sequence of SEQ ID NO:348, a CDR2 comprising the amino acid sequence of SEQ ID NO:349, and a CDR3 comprising the amino acid sequence of SEQ ID NO:350.

[0119] In one embodiment, the antibody is an isolated COV_3028 antibody. As used herein, the term “COV_3028” refers to a monoclonal antibody, or antigen-binding fragment thereof, that binds to the S2 subunit of a coronavirus, such as SARS-CoV-2, wherein the antibody comprises 1) a heavy chain variable domain comprising the amino acid sequence of SEQ ID NO:352 and a light chain variable domain comprising the amino acid sequence of SEQ ID NO:357; or 2) a heavy chain variable domain comprising a CDR1 comprising the amino acid sequence of SEQ ID NO:353, a CDR2 comprising the amino acid sequence of SEQ ID NO:354, and a CDR3 comprising the amino acid sequence of SEQ ID NO:355 and alight chain variable domain comprising a CDR1 comprising the amino acid sequence of SEQ ID NO:358, a CDR2 comprising the amino acid sequence of SEQ ID NO:359, and a CDR3 comprising the amino acid sequence of SEQ ID NO:360.

[0120] In one embodiment, the antibody is an isolated COV_3031 antibody. As used herein, the term “COV_3031” refers to a monoclonal antibody, or antigen-binding fragment thereof, that binds to the S2 subunit of a coronavirus, such as SARS-CoV-2, wherein the antibody comprises 1) a heavy chain variable domain comprising the amino acid sequence of SEQ ID NO:362 and a light chain variable domain comprising the amino acid sequence of SEQ ID NO:367; or 2) a heavy chain variable domain comprising a CDR1 comprising the amino acid sequence of SEQ ID NO:363, a CDR2 comprising the amino acid sequence of SEQ ID NO:364, and a CDR3 comprising the amino acid sequence of SEQ ID NO:365 and a light chain variable domain comprising a CDR1 comprising the amino acid sequence of SEQ ID NO:368, a CDR2 comprising the amino acid sequence of SEQ ID NO:369, and a CDR3 comprising the amino acid sequence of SEQ ID NO:370.

[0121] In one embodiment, the antibody is an isolated COV_3033 antibody. As used herein, the term “COV_3033” refers to a monoclonal antibody, or antigen-binding fragment thereof, that binds to the S2 subunit of a coronavirus, such as SARS-CoV-2, wherein the antibody comprises 1) a heavy chain variable domain comprising the amino acid sequence of SEQ ID NO:372 and a light chain variable domain comprising the amino acid sequence of SEQ ID NO:377; or 2) a heavy chain variable domain comprising a CDR1 comprising the amino acid sequence of SEQ ID NO:373, a CDR2 comprising the amino acid sequence of SEQ ID NO:374, and a CDR3 comprising the amino acid sequence of SEQ ID NO:375 and a light chain variable domain comprising a CDR1 comprising the amino acid sequence of SEQ ID NO:378, a CDR2 comprising the amino acid sequence of SEQ ID NO:379, and a CDR3 comprising the amino acid sequence of SEQ ID NO:380.

[0122] In one embodiment, the antibody is an isolated COV_3037 antibody. As used herein, the term “COV_3037” refers to a monoclonal antibody, or antigen-binding fragment thereof, that binds to the S2 subunit of a coronavirus, such as SARS-CoV-2, wherein the antibody comprises 1) a heavy chain variable domain comprising the amino acid sequence of SEQ ID NO:382 and a light chain variable domain comprising the amino acid sequence of SEQ ID NO:387; or 2) a heavy chain variable domain comprising a CDR1 comprising the amino acid sequence of SEQ ID NO:383, a CDR2 comprising the amino acid sequence of SEQ ID NO:384, and a CDR3 comprising the amino acid sequence of SEQ ID NO:385 and alight chain variable domain comprising a CDR1 comprising the amino acid sequence of SEQ ID NO:388, a CDR2 comprising the amino acid sequence of SEQ ID NO:389, and a CDR3 comprising the amino acid sequence of SEQ ID NO:390.

[0123] In one embodiment, the antibody is an isolated COV_3040 antibody. As used herein, the term “COV_3040” refers to a monoclonal antibody, or antigen-binding fragment thereof, that binds to the S2 subunit of a coronavirus, such as SARS-CoV-2, wherein the antibody comprises 1) a heavy chain variable domain comprising the amino acid sequence of SEQ ID NO:392 and a light chain variable domain comprising the amino acid sequence of SEQ ID NO:397; or 2) a heavy chain variable domain comprising a CDR1 comprising the amino acid sequence of SEQ ID NO:393, a CDR2 comprising the amino acid sequence of SEQ ID NO:394, and a CDR3 comprising the amino acid sequence of SEQ ID NO:395 and alight chain variable domain comprising a CDR1 comprising the amino acid sequence of SEQ ID NO:398, a CDR2 comprising the amino acid sequence of SEQ ID NO:399, and a CDR3 comprising the amino acid sequence of SEQ ID NO:400.

[0124] In one embodiment, the antibody is an isolated COV_3043 antibody. As used herein, the term “COV_3043” refers to a monoclonal antibody, or antigen-binding fragment thereof, that binds to the S2 subunit of a coronavirus, such as SARS-CoV-2, wherein the antibody comprises 1) a heavy chain variable domain comprising the amino acid sequence of SEQ ID NO:402 and a light chain variable domain comprising the amino acid sequence of SEQ ID NO:407; or 2) a heavy chain variable domain comprising a CDR1 comprising the amino acid sequence of SEQ ID NO:403, a CDR2 comprising the amino acid sequence of SEQ ID NO:404, and a CDR3 comprising the amino acid sequence of SEQ ID NO:405 and a light chain variable domain comprising a CDR1 comprising the amino acid sequence of SEQ ID NO:408, a CDR2 comprising the amino acid sequence of SEQ ID NO:409, and a CDR3 comprising the amino acid sequence of SEQ ID NO:410.

[0125] In one embodiment, the antibody is an isolated COV_3053 antibody. As used herein, the term “COV_3053” refers to a monoclonal antibody, or antigen-binding fragment thereof, that binds to the S1 NTD or S1 RBD domain of a coronavirus, such as SARS-CoV-2, wherein the antibody comprises 1) a heavy chain variable domain comprising the amino acid sequence of SEQ ID NO:412 and a light chain variable domain comprising the amino acid sequence of SEQ ID NO:417; or 2) a heavy chain variable domain comprising a CDR1 comprising the amino acid sequence of SEQ ID NO:413, a CDR2 comprising the amino acid sequence of SEQ ID NO:414, and a CDR3 comprising the amino acid sequence of SEQ ID NO:415 and a light chain variable domain comprising a CDR1 comprising the amino acid sequence of SEQ ID NO:418, a CDR2 comprising the amino acid sequence of SEQ ID NO:419, and a CDR3 comprising the amino acid sequence of SEQ ID NO:420.

[0126] In one embodiment, the antibody is an isolated COV_3088 antibody. As used herein, the term “COV_3088” refers to a monoclonal antibody, or antigen-binding fragment thereof, that binds to the S1 RBD domain of a coronavirus, such as SARS-CoV-2, wherein the antibody comprises 1) a heavy chain variable domain comprising the amino acid sequence of SEQ ID NO:422 and a light chain variable domain comprising the amino acid sequence of SEQ ID NO:427; or 2) a heavy chain variable domain comprising a CDR1 comprising the amino acid sequence of SEQ ID NO:423, a CDR2 comprising the amino acid sequence of SEQ ID NO:424, and a CDR3 comprising the amino acid sequence of SEQ ID NO:425 and a light chain variable domain comprising a CDR1 comprising the amino acid sequence of SEQ ID NO:428, a CDR2 comprising the amino acid sequence of SEQ ID NO:429, and a CDR3 comprising the amino acid sequence of SEQ ID NO:430.

[0127] In one embodiment, the antibody is an isolated COV_1012 antibody. As used herein, the term “COV_1012” refers to a monoclonal antibody, or antigen-binding fragment thereof, that binds to the S2 domain of a coronavirus, such as SARS-CoV-2, wherein the antibody comprises 1) a heavy chain variable domain comprising the amino acid sequence of SEQ ID NO:452 and a light chain variable domain comprising the amino acid sequence of SEQ ID NO:457; or 2) a heavy chain variable domain comprising a CDR1 comprising the amino acid sequence of SEQ ID NO:453, a CDR2 comprising the amino acid sequence of SEQ ID NO:454, and a CDR3 comprising the amino acid sequence of SEQ ID NO:455 and a light chain variable domain comprising a CDR1 comprising the amino acid sequence of SEQ ID NO:458, a CDR2 comprising the amino acid sequence of SEQ ID NO:459, and a CDR3 comprising the amino acid sequence of SEQ ID NO:460.

[0128] In one embodiment, the antibody is an isolated COV_1025 antibody. As used herein, the term “COV_1025” refers to a monoclonal antibody, or antigen-binding fragment thereof, that binds to the S2 domain of a coronavirus, such as SARS-CoV-2, wherein the antibody comprises 1) a heavy chain variable domain comprising the amino acid sequence of SEQ ID NO:462 and a light chain variable domain comprising the amino acid sequence of SEQ ID NO:467; or 2) a heavy chain variable domain comprising a CDR1 comprising the amino acid sequence of SEQ ID NO:463, a CDR2 comprising the amino acid sequence of SEQ ID NO:464, and a CDR3 comprising the amino acid sequence of SEQ ID NO:465 and alight chain variable domain comprising a CDR1 comprising the amino acid sequence of SEQ ID NO:468, a CDR2 comprising the amino acid sequence of SEQ ID NO:469, and a CDR3 comprising the amino acid sequence of SEQ ID NO:470.

[0129] In one embodiment, the antibody is an isolated COV_1032 antibody. As used herein, the term “COV_1032” refers to a monoclonal antibody, or antigen-binding fragment thereof, that binds to the S2 domain of a coronavirus, such as SARS-CoV-2, wherein the antibody comprises 1) a heavy chain variable domain comprising the amino acid sequence of SEQ ID NO:472 and a light chain variable domain comprising the amino acid sequence of SEQ ID NO:477; or 2) a heavy chain variable domain comprising a CDR1 comprising the amino acid sequence of SEQ ID NO:473, a CDR2 comprising the amino acid sequence of SEQ ID NO:474, and a CDR3 comprising the amino acid sequence of SEQ ID NO:475 and a light chain variable domain comprising a CDR1 comprising the amino acid sequence of SEQ ID NO:478, a CDR2 comprising the amino acid sequence of SEQ ID NO:479, and a CDR3 comprising the amino acid sequence of SEQ ID NO:480.

[0130] In one embodiment, the antibody is an isolated COV_1050 antibody. As used herein, the term “COV_1050” refers to a monoclonal antibody, or antigen-binding fragment thereof, that binds to the S2 domain of a coronavirus, such as SARS-CoV-2, wherein the antibody comprises 1) a heavy chain variable domain comprising the amino acid sequence of SEQ ID NO:482 and a light chain variable domain comprising the amino acid sequence of SEQ ID NO:487; or 2) a heavy chain variable domain comprising a CDR1 comprising the amino acid sequence of SEQ ID NO:483, a CDR2 comprising the amino acid sequence of SEQ ID NO:484, and a CDR3 comprising the amino acid sequence of SEQ ID NO:485 and a light chain variable domain comprising a CDR1 comprising the amino acid sequence of SEQ ID NO:488, a CDR2 comprising the amino acid sequence of SEQ ID NO:489, and a CDR3 comprising the amino acid sequence of SEQ ID NO:490.

[0131] In one embodiment, the antibody is an isolated COV_1056 antibody. As used herein, the term “COV_1056” refers to a monoclonal antibody, or antigen-binding fragment thereof, that binds to the S2 domain of a coronavirus, such as SARS-CoV-2, wherein the antibody comprises 1) a heavy chain variable domain comprising the amino acid sequence of SEQ ID NO: 492 and a light chain variable domain comprising the amino acid sequence of SEQ ID NO:497; or 2) a heavy chain variable domain comprising a CDR1 comprising the amino acid sequence of SEQ ID NO:493, a CDR2 comprising the amino acid sequence of SEQ ID NO:494, and a CDR3 comprising the amino acid sequence of SEQ ID NO:495 and a light chain variable domain comprising a CDR1 comprising the amino acid sequence of SEQ ID NO:498, a CDR2 comprising the amino acid sequence of SEQ ID NO:499, and a CDR3 comprising the amino acid sequence of SEQ ID NO:500.

[0132] In one embodiment, the antibody is an isolated COV_1060 antibody. As used herein, the term “COV_1060” refers to a monoclonal antibody, or antigen-binding fragment thereof, that binds to the S2 domain of a coronavirus, such as SARS-CoV-2, wherein the antibody comprises 1) a heavy chain variable domain comprising the amino acid sequence of SEQ ID NO:502 and a light chain variable domain comprising the amino acid sequence of SEQ ID NO:507; or 2) a heavy chain variable domain comprising a CDR1 comprising the amino acid sequence of SEQ ID NO:503, a CDR2 comprising the amino acid sequence of SEQ ID NO:504, and a CDR3 comprising the amino acid sequence of SEQ ID NO:505 and alight chain variable domain comprising a CDR1 comprising the amino acid sequence of SEQ ID NO:508, a CDR2 comprising the amino acid sequence of SEQ ID NO:509, and a CDR3 comprising the amino acid sequence of SEQ ID NO:510.

[0133] In one embodiment, the antibody is an isolated COV_1063 antibody. As used herein, the term “COV_1063” refers to a monoclonal antibody, or antigen-binding fragment thereof, that binds to the S2 domain of a coronavirus, such as SARS-CoV-2, wherein the antibody comprises 1) a heavy chain variable domain comprising the amino acid sequence of SEQ ID NO:512 and a light chain variable domain comprising the amino acid sequence of SEQ ID NO:517; or 2) a heavy chain variable domain comprising a CDR1 comprising the amino acid sequence of SEQ ID NO:513, a CDR2 comprising the amino acid sequence of SEQ ID NO:514, and a CDR3 comprising the amino acid sequence of SEQ ID NO:515 and alight chain variable domain comprising a CDR1 comprising the amino acid sequence of SEQ ID NO:518, a CDR2 comprising the amino acid sequence of SEQ ID NO:519, and a CDR3 comprising the amino acid sequence of SEQ ID NO:520.

[0134] In one embodiment, the antibody is an isolated COV_1071 antibody. As used herein, the term “COV_1071” refers to a monoclonal antibody, or antigen-binding fragment thereof, that binds to the S2 domain of a coronavirus, such as SARS-CoV-2, wherein the antibody comprises 1) a heavy chain variable domain comprising the amino acid sequence of SEQ ID NO:522 and a light chain variable domain comprising the amino acid sequence of SEQ ID NO:527; or 2) a heavy chain variable domain comprising a CDR1 comprising the amino acid sequence of SEQ ID NO:523, a CDR2 comprising the amino acid sequence of SEQ ID NO:524, and a CDR3 comprising the amino acid sequence of SEQ ID NO:525 and alight chain variable domain comprising a CDR1 comprising the amino acid sequence of SEQ ID NO:528, a CDR2 comprising the amino acid sequence of SEQ ID NO:529, and a CDR3 comprising the amino acid sequence of SEQ ID NO:530.

[0135] In one embodiment, the antibody is an isolated COV_1076 antibody. As used herein, the term “COV_1076” refers to a monoclonal antibody, or antigen-binding fragment thereof, that binds to the S2 domain of a coronavirus, such as SARS-CoV-2, wherein the antibody comprises 1) a heavy chain variable domain comprising the amino acid sequence of SEQ ID NO:532 and a light chain variable domain comprising the amino acid sequence of SEQ ID NO:537; or 2) a heavy chain variable domain comprising a CDR1 comprising the amino acid sequence of SEQ ID NO:533, a CDR2 comprising the amino acid sequence of SEQ ID NO:534, and a CDR3 comprising the amino acid sequence of SEQ ID NO:535 and a light chain variable domain comprising a CDR1 comprising the amino acid sequence of SEQ ID NO:538, a CDR2 comprising the amino acid sequence of SEQ ID NO:539, and a CDR3 comprising the amino acid sequence of SEQ ID NO:540.

[0136] In one embodiment, the antibody is an isolated COV_1082 antibody. As used herein, the term “COV_1082” refers to a monoclonal antibody, or antigen-binding fragment thereof, that binds to the S2 domain of a coronavirus, such as SARS-CoV-2, wherein the antibody comprises 1) a heavy chain variable domain comprising the amino acid sequence of SEQ ID NO:542 and a light chain variable domain comprising the amino acid sequence of SEQ ID NO:547; or 2) a heavy chain variable domain comprising a CDR1 comprising the amino acid sequence of SEQ ID NO:543, a CDR2 comprising the amino acid sequence of SEQ ID NO:544, and a CDR3 comprising the amino acid sequence of SEQ ID NO:545 and alight chain variable domain comprising a CDR1 comprising the amino acid sequence of SEQ ID NO:548, a CDR2 comprising the amino acid sequence of SEQ ID NO:549, and a CDR3 comprising the amino acid sequence of SEQ ID NO:550.

[0137] In one embodiment, the antibody is an isolated COV_1085 antibody. As used herein, the term “COV_1085” refers to a monoclonal antibody, or antigen-binding fragment thereof, that binds to the S2 domain of a coronavirus, such as SARS-CoV-2, wherein the antibody comprises 1) a heavy chain variable domain comprising the amino acid sequence of SEQ ID NO:552 and a light chain variable domain comprising the amino acid sequence of SEQ ID NO:557; or 2) a heavy chain variable domain comprising a CDR1 comprising the amino acid sequence of SEQ ID NO:553, a CDR2 comprising the amino acid sequence of SEQ ID NO:554, and a CDR3 comprising the amino acid sequence of SEQ ID NO:555 and alight chain variable domain comprising a CDR1 comprising the amino acid sequence of SEQ ID NO:558, a CDR2 comprising the amino acid sequence of SEQ ID NO:559, and a CDR3 comprising the amino acid sequence of SEQ ID NO:560.

[0138] In one embodiment, the antibody is an isolated COV_1086 antibody. As used herein, the term “COV_1086” refers to a monoclonal antibody, or antigen-binding fragment thereof, that binds to the S2 domain of a coronavirus, such as SARS-CoV-2, wherein the antibody comprises 1) a heavy chain variable domain comprising the amino acid sequence of SEQ ID NO:562 and a light chain variable domain comprising the amino acid sequence of SEQ ID NO:567; or 2) a heavy chain variable domain comprising a CDR1 comprising the amino acid sequence of SEQ ID NO:563, a CDR2 comprising the amino acid sequence of SEQ ID NO:564, and a CDR3 comprising the amino acid sequence of SEQ ID NO:565 and alight chain variable domain comprising a CDR1 comprising the amino acid sequence of SEQ ID NO:568, a CDR2 comprising the amino acid sequence of SEQ ID NO:569, and a CDR3 comprising the amino acid sequence of SEQ ID NO:570.

[0139] In one embodiment, the antibody is an isolated COV_1087 antibody. As used herein, the term “COV_1087” refers to a monoclonal antibody, or antigen-binding fragment thereof, that binds to the S2 domain of a coronavirus, such as SARS-CoV-2, wherein the antibody comprises 1) a heavy chain variable domain comprising the amino acid sequence of SEQ ID NO:572 and a light chain variable domain comprising the amino acid sequence of SEQ ID NO:577; or 2) a heavy chain variable domain comprising a CDR1 comprising the amino acid sequence of SEQ ID NO:573, a CDR2 comprising the amino acid sequence of SEQ ID NO:574, and a CDR3 comprising the amino acid sequence of SEQ ID NO:575 and a light chain variable domain comprising a CDR1 comprising the amino acid sequence of SEQ ID NO:578, a CDR2 comprising the amino acid sequence of SEQ ID NO:579, and a CDR3 comprising the amino acid sequence of SEQ ID NO:580.

[0140] In one embodiment, the antibody is an isolated COV_1097 antibody. As used herein, the term “COV_1097” refers to a monoclonal antibody, or antigen-binding fragment thereof, that binds to the S2 domain of a coronavirus, such as SARS-CoV-2, wherein the antibody comprises 1) a heavy chain variable domain comprising the amino acid sequence of SEQ ID NO:582 and a light chain variable domain comprising the amino acid sequence of SEQ ID NO:587; or 2) a heavy chain variable domain comprising a CDR1 comprising the amino acid sequence of SEQ ID NO:583, a CDR2 comprising the amino acid sequence of SEQ ID NO:584, and a CDR3 comprising the amino acid sequence of SEQ ID NO:585 and alight chain variable domain comprising a CDR1 comprising the amino acid sequence of SEQ ID NO:588, a CDR2 comprising the amino acid sequence of SEQ ID NO:589, and a CDR3 comprising the amino acid sequence of SEQ ID NO:590.

[0141] In one embodiment, the antibody is an isolated COV_1116 antibody. As used herein, the term “COV_1116” refers to a monoclonal antibody, or antigen-binding fragment thereof, that binds to the S2 domain of a coronavirus, such as SARS-CoV-2, wherein the antibody comprises 1) a heavy chain variable domain comprising the amino acid sequence of SEQ ID NO:592 and a light chain variable domain comprising the amino acid sequence of SEQ ID NO:597; or 2) a heavy chain variable domain comprising a CDR1 comprising the amino acid sequence of SEQ ID NO:593, a CDR2 comprising the amino acid sequence of SEQ ID NO:594, and a CDR3 comprising the amino acid sequence of SEQ ID NO:595 and a light chain variable domain comprising a CDR1 comprising the amino acid sequence of SEQ ID NO:598, a CDR2 comprising the amino acid sequence of SEQ ID NO:599, and a CDR3 comprising the amino acid sequence of SEQ ID NO:600.

[0142] In one embodiment, the antibody is an isolated COV_1118 antibody. As used herein, the term “COV_1118” refers to a monoclonal antibody, or antigen-binding fragment thereof, that binds to the S2 domain of a coronavirus, such as SARS-CoV-2, wherein the antibody comprises 1) a heavy chain variable domain comprising the amino acid sequence of SEQ ID NO:602 and a light chain variable domain comprising the amino acid sequence of SEQ ID NO:607; or 2) a heavy chain variable domain comprising a CDR1 comprising the amino acid sequence of SEQ ID NO:603, a CDR2 comprising the amino acid sequence of SEQ ID NO:604, and a CDR3 comprising the amino acid sequence of SEQ ID NO:605 and a light chain variable domain comprising a CDR1 comprising the amino acid sequence of SEQ ID NO:608, a CDR2 comprising the amino acid sequence of SEQ ID NO:609, and a CDR3 comprising the amino acid sequence of SEQ ID NO:610.

[0143] In one embodiment, the antibody is an isolated COV_1122 antibody. As used herein, the term “COV_1122” refers to a monoclonal antibody, or antigen-binding fragment thereof, that binds to the S2 domain of a coronavirus, such as SARS-CoV-2, wherein the antibody comprises 1) a heavy chain variable domain comprising the amino acid sequence of SEQ ID NO:612 and a light chain variable domain comprising the amino acid sequence of SEQ ID NO:617; or 2) a heavy chain variable domain comprising a CDR1 comprising the amino acid sequence of SEQ ID NO:613, a CDR2 comprising the amino acid sequence of SEQ ID NO:614, and a CDR3 comprising the amino acid sequence of SEQ ID NO:615 and alight chain variable domain comprising a CDR1 comprising the amino acid sequence of SEQ ID NO:618, a CDR2 comprising the amino acid sequence of SEQ ID NO:619, and a CDR3 comprising the amino acid sequence of SEQ ID NO:620.

[0144] In one embodiment, the antibody is an isolated COV_1131 antibody. As used herein, the term “COV_1131” refers to a monoclonal antibody, or antigen-binding fragment thereof, that binds to the S2 domain of a coronavirus, such as SARS-CoV-2, wherein the antibody comprises 1) a heavy chain variable domain comprising the amino acid sequence of SEQ ID NO:622 and a light chain variable domain comprising the amino acid sequence of SEQ ID NO:627; or 2) a heavy chain variable domain comprising a CDR1 comprising the amino acid sequence of SEQ ID NO:623, a CDR2 comprising the amino acid sequence of SEQ ID NO:624, and a CDR3 comprising the amino acid sequence of SEQ ID NO:625 and a light chain variable domain comprising a CDR1 comprising the amino acid sequence of SEQ ID NO:628, a CDR2 comprising the amino acid sequence of SEQ ID NO:629, and a CDR3 comprising the amino acid sequence of SEQ ID NO:630.

[0145] In one embodiment, the antibody is an isolated COV_1136 antibody. As used herein, the term “COV_1136” refers to a monoclonal antibody, or antigen-binding fragment thereof, that binds to the S2 domain of a coronavirus, such as SARS-CoV-2, wherein the antibody comprises 1) a heavy chain variable domain comprising the amino acid sequence of SEQ ID NO:632 and a light chain variable domain comprising the amino acid sequence of SEQ ID NO:637; or 2) a heavy chain variable domain comprising a CDR1 comprising the amino acid sequence of SEQ ID NO:633, a CDR2 comprising the amino acid sequence of SEQ ID NO:634, and a CDR3 comprising the amino acid sequence of SEQ ID NO:635 and alight chain variable domain comprising a CDR1 comprising the amino acid sequence of SEQ ID NO:638, a CDR2 comprising the amino acid sequence of SEQ ID NO:639, and a CDR3 comprising the amino acid sequence of SEQ ID NO:640.

[0146] In one embodiment, the antibody is an isolated COV_1144 antibody. As used herein, the term “COV_1144” refers to a monoclonal antibody, or antigen-binding fragment thereof, that binds to the S2 domain of a coronavirus, such as SARS-CoV-2, wherein the antibody comprises 1) a heavy chain variable domain comprising the amino acid sequence of SEQ ID NO:642 and a light chain variable domain comprising the amino acid sequence of SEQ ID NO:647; or 2) a heavy chain variable domain comprising a CDR1 comprising the amino acid sequence of SEQ ID NO:643, a CDR2 comprising the amino acid sequence of SEQ ID NO:644, and a CDR3 comprising the amino acid sequence of SEQ ID NO:645 and a light chain variable domain comprising a CDR1 comprising the amino acid sequence of SEQ ID NO:648, a CDR2 comprising the amino acid sequence of SEQ ID NO:649, and a CDR3 comprising the amino acid sequence of SEQ ID NO:650.

[0147] In one embodiment, the antibody is an isolated COV_1145 antibody. As used herein, the term “COV_1145” refers to a monoclonal antibody, or antigen-binding fragment thereof, that binds to the S2 domain of a coronavirus, such as SARS-CoV-2, wherein the antibody comprises 1) a heavy chain variable domain comprising the amino acid sequence of SEQ ID NO:652 and a light chain variable domain comprising the amino acid sequence of SEQ ID NO:657; or 2) a heavy chain variable domain comprising a CDR1 comprising the amino acid sequence of SEQ ID NO:653, a CDR2 comprising the amino acid sequence of SEQ ID NO:654, and a CDR3 comprising the amino acid sequence of SEQ ID NO:655 and alight chain variable domain comprising a CDR1 comprising the amino acid sequence of SEQ ID NO:658, a CDR2 comprising the amino acid sequence of SEQ ID NO:659, and a CDR3 comprising the amino acid sequence of SEQ ID NO:660.

[0148] In one embodiment, the antibody is an isolated COV_1149 antibody. As used herein, the term “COV_1149” refers to a monoclonal antibody, or antigen-binding fragment thereof, that binds to the S2 domain of a coronavirus, such as SARS-CoV-2, wherein the antibody comprises 1) a heavy chain variable domain comprising the amino acid sequence of SEQ ID NO:662 and a light chain variable domain comprising the amino acid sequence of SEQ ID NO:667; or 2) a heavy chain variable domain comprising a CDR1 comprising the amino acid sequence of SEQ ID NO:663, a CDR2 comprising the amino acid sequence of SEQ ID NO:664, and a CDR3 comprising the amino acid sequence of SEQ ID NO:665 and a light chain variable domain comprising a CDR1 comprising the amino acid sequence of SEQ ID NO:668, a CDR2 comprising the amino acid sequence of SEQ ID NO:669, and a CDR3 comprising the amino acid sequence of SEQ ID NO:670.

[0149] In one embodiment, the antibody is an isolated COV_1151 antibody. As used herein, the term “COV_1151” refers to a monoclonal antibody, or antigen-binding fragment thereof, that binds to the S2 domain of a coronavirus, such as SARS-CoV-2, wherein the antibody comprises 1) a heavy chain variable domain comprising the amino acid sequence of SEQ ID NO:672 and a light chain variable domain comprising the amino acid sequence of SEQ ID NO:677; or 2) a heavy chain variable domain comprising a CDR1 comprising the amino acid sequence of SEQ ID NO:673, a CDR2 comprising the amino acid sequence of SEQ ID NO:674, and a CDR3 comprising the amino acid sequence of SEQ ID NO:675 and a light chain variable domain comprising a CDR1 comprising the amino acid sequence of SEQ ID NO:678, a CDR2 comprising the amino acid sequence of SEQ ID NO:679, and a CDR3 comprising the amino acid sequence of SEQ ID NO:680.

[0150] In one embodiment, the antibody is an isolated COV_1154 antibody. As used herein, the term “COV_1154” refers to a monoclonal antibody, or antigen-binding fragment thereof, that binds to the S2 domain of a coronavirus, such as SARS-CoV-2, wherein the antibody comprises 1) a heavy chain variable domain comprising the amino acid sequence of SEQ ID NO: 682 and a light chain variable domain comprising the amino acid sequence of SEQ ID NO:687; or 2) a heavy chain variable domain comprising a CDR1 comprising the amino acid sequence of SEQ ID NO:683, a CDR2 comprising the amino acid sequence of SEQ ID NO:684, and a CDR3 comprising the amino acid sequence of SEQ ID NO:685 and alight chain variable domain comprising a CDR1 comprising the amino acid sequence of SEQ ID NO:688, a CDR2 comprising the amino acid sequence of SEQ ID NO:689, and a CDR3 comprising the amino acid sequence of SEQ ID NO:690.

[0151] In one embodiment, the antibody is an isolated COV_1165 antibody. As used herein, the term “COV_1165” refers to a monoclonal antibody, or antigen-binding fragment thereof, that binds to the S2 domain of a coronavirus, such as SARS-CoV-2, wherein the antibody comprises 1) a heavy chain variable domain comprising the amino acid sequence of SEQ ID NO:692 and a light chain variable domain comprising the amino acid sequence of SEQ ID NO:697; or 2) a heavy chain variable domain comprising a CDR1 comprising the amino acid sequence of SEQ ID NO:693, a CDR2 comprising the amino acid sequence of SEQ ID NO:694, and a CDR3 comprising the amino acid sequence of SEQ ID NO:695 and a light chain variable domain comprising a CDR1 comprising the amino acid sequence of SEQ ID NO:698, a CDR2 comprising the amino acid sequence of SEQ ID NO:699, and a CDR3 comprising the amino acid sequence of SEQ ID NO:700.

[0152] In one embodiment, the antibody is an isolated COV_1166 antibody. As used herein, the term “COV_1166” refers to a monoclonal antibody, or antigen-binding fragment thereof, that binds to the S2 domain of a coronavirus, such as SARS-CoV-2, wherein the antibody comprises 1) a heavy chain variable domain comprising the amino acid sequence of SEQ ID NO:702 and a light chain variable domain comprising the amino acid sequence of SEQ ID NO:707; or 2) a heavy chain variable domain comprising a CDR1 comprising the amino acid sequence of SEQ ID NO:703, a CDR2 comprising the amino acid sequence of SEQ ID NO:704, and a CDR3 comprising the amino acid sequence of SEQ ID NO:705 and alight chain variable domain comprising a CDR1 comprising the amino acid sequence of SEQ ID NO:708, a CDR2 comprising the amino acid sequence of SEQ ID NO:709, and a CDR3 comprising the amino acid sequence of SEQ ID NO:710.

[0153] In one embodiment, the antibody is an isolated COV_1170 antibody. As used herein, the term “COV_1170” refers to a monoclonal antibody, or antigen-binding fragment thereof, that binds to the S2 domain of a coronavirus, such as SARS-CoV-2, wherein the antibody comprises 1) a heavy chain variable domain comprising the amino acid sequence of SEQ ID NO:712 and a light chain variable domain comprising the amino acid sequence of SEQ ID NO:717; or 2) a heavy chain variable domain comprising a CDR1 comprising the amino acid sequence of SEQ ID NO:713, a CDR2 comprising the amino acid sequence of SEQ ID NO:714, and a CDR3 comprising the amino acid sequence of SEQ ID NO:715 and alight chain variable domain comprising a CDR1 comprising the amino acid sequence of SEQ ID NO:718, a CDR2 comprising the amino acid sequence of SEQ ID NO:719, and a CDR3 comprising the amino acid sequence of SEQ ID NO:720.

[0154] In one embodiment, the antibody is an isolated COV_1172 antibody. As used herein, the term “COV_1172” refers to a monoclonal antibody, or antigen-binding fragment thereof, that binds to the S2 domain of a coronavirus, such as SARS-CoV-2, wherein the antibody comprises 1) a heavy chain variable domain comprising the amino acid sequence of SEQ ID NO:722 and a light chain variable domain comprising the amino acid sequence of SEQ ID NO:727; or 2) a heavy chain variable domain comprising a CDR1 comprising the amino acid sequence of SEQ ID NO:723, a CDR2 comprising the amino acid sequence of SEQ ID NO:724, and a CDR3 comprising the amino acid sequence of SEQ ID NO:725 and alight chain variable domain comprising a CDR1 comprising the amino acid sequence of SEQ ID NO:728, a CDR2 comprising the amino acid sequence of SEQ ID NO:729, and a CDR3 comprising the amino acid sequence of SEQ ID NO:730.

[0155] In one embodiment, the antibody is an isolated COV_1177 antibody. As used herein, the term “COV_1177” refers to a monoclonal antibody, or antigen-binding fragment thereof, that binds to the S2 domain of a coronavirus, such as SARS-CoV-2, wherein the antibody comprises 1) a heavy chain variable domain comprising the amino acid sequence of SEQ ID NO:732 and a light chain variable domain comprising the amino acid sequence of SEQ ID NO:737; or 2) a heavy chain variable domain comprising a CDR1 comprising the amino acid sequence of SEQ ID NO:733, a CDR2 comprising the amino acid sequence of SEQ ID NO:734, and a CDR3 comprising the amino acid sequence of SEQ ID NO:735 and alight chain variable domain comprising a CDR1 comprising the amino acid sequence of SEQ ID NO:738, a CDR2 comprising the amino acid sequence of SEQ ID NO:739, and a CDR3 comprising the amino acid sequence of SEQ ID NO:740.

[0156] In one embodiment, the antibody is an isolated COV_1184 antibody. As used herein, the term “COV_1184” refers to a monoclonal antibody, or antigen-binding fragment thereof, that binds to the S2 domain of a coronavirus, such as SARS-CoV-2, wherein the antibody comprises 1) a heavy chain variable domain comprising the amino acid sequence of SEQ ID NO:742 and a light chain variable domain comprising the amino acid sequence of SEQ ID NO:747; or 2) a heavy chain variable domain comprising a CDR1 comprising the amino acid sequence of SEQ ID NO:743, a CDR2 comprising the amino acid sequence of SEQ ID NO:744, and a CDR3 comprising the amino acid sequence of SEQ ID NO:745 and a light chain variable domain comprising a CDR1 comprising the amino acid sequence of SEQ ID NO:748, a CDR2 comprising the amino acid sequence of SEQ ID NO:749, and a CDR3 comprising the amino acid sequence of SEQ ID NO:750.

[0157] In one embodiment, the antibody is an isolated COV_1198 antibody. As used herein, the term “COV_1198” refers to a monoclonal antibody, or antigen-binding fragment thereof, that binds to the S2 domain of a coronavirus, such as SARS-CoV-2, wherein the antibody comprises 1) a heavy chain variable domain comprising the amino acid sequence of SEQ ID NO:752 and a light chain variable domain comprising the amino acid sequence of SEQ ID NO:757; or 2) a heavy chain variable domain comprising a CDR1 comprising the amino acid sequence of SEQ ID NO:753, a CDR2 comprising the amino acid sequence of SEQ ID NO:754, and a CDR3 comprising the amino acid sequence of SEQ ID NO:755 and alight chain variable domain comprising a CDR1 comprising the amino acid sequence of SEQ ID NO:758, a CDR2 comprising the amino acid sequence of SEQ ID NO:759, and a CDR3 comprising the amino acid sequence of SEQ ID NO:760.

[0158] In one embodiment, the antibody is an isolated COV_2032 antibody. As used herein, the term “COV_2032” refers to a monoclonal antibody, or antigen-binding fragment thereof, that binds to the S2 domain of a coronavirus, such as SARS-CoV-2, wherein the antibody comprises 1) a heavy chain variable domain comprising the amino acid sequence of SEQ ID NO:762 and a light chain variable domain comprising the amino acid sequence of SEQ ID NO:767; or 2) a heavy chain variable domain comprising a CDR1 comprising the amino acid sequence of SEQ ID NO:763, a CDR2 comprising the amino acid sequence of SEQ ID NO:764, and a CDR3 comprising the amino acid sequence of SEQ ID NO:765 and alight chain variable domain comprising a CDR1 comprising the amino acid sequence of SEQ ID NO:768, a CDR2 comprising the amino acid sequence of SEQ ID NO:769, and a CDR3 comprising the amino acid sequence of SEQ ID NO:770.

[0159] In one embodiment, the antibody is an isolated COV_2048 antibody. As used herein, the term “COV_2048” refers to a monoclonal antibody, or antigen-binding fragment thereof, that binds to the S2 domain of a coronavirus, such as SARS-CoV-2, wherein the antibody comprises 1) a heavy chain variable domain comprising the amino acid sequence of SEQ ID NO:772 and a light chain variable domain comprising the amino acid sequence of SEQ ID NO:777; or 2) a heavy chain variable domain comprising a CDR1 comprising the amino acid sequence of SEQ ID NO:773, a CDR2 comprising the amino acid sequence of SEQ ID NO:774, and a CDR3 comprising the amino acid sequence of SEQ ID NO:775 and alight chain variable domain comprising a CDR1 comprising the amino acid sequence of SEQ ID NO:778, a CDR2 comprising the amino acid sequence of SEQ ID NO:779, and a CDR3 comprising the amino acid sequence of SEQ ID NO:780.

[0160] In one embodiment, the antibody is an isolated COV_2055 antibody. As used herein, the term “COV_2055” refers to a monoclonal antibody, or antigen-binding fragment thereof, that binds to the S2 domain of a coronavirus, such as SARS-CoV-2, wherein the antibody comprises 1) a heavy chain variable domain comprising the amino acid sequence of SEQ ID NO:782 and a light chain variable domain comprising the amino acid sequence of SEQ ID NO:787; or 2) a heavy chain variable domain comprising a CDR1 comprising the amino acid sequence of SEQ ID NO:783, a CDR2 comprising the amino acid sequence of SEQ ID NO:784, and a CDR3 comprising the amino acid sequence of SEQ ID NO:785 and a light chain variable domain comprising a CDR1 comprising the amino acid sequence of SEQ ID NO:788, a CDR2 comprising the amino acid sequence of SEQ ID NO:789, and a CDR3 comprising the amino acid sequence of SEQ ID NO:790.

[0161] In one embodiment, the antibody is an isolated COV_2056 antibody. As used herein, the term “COV_2056” refers to a monoclonal antibody, or antigen-binding fragment thereof, that binds to the S1 RBD domain of a coronavirus, such as SARS-CoV-2, wherein the antibody comprises 1) a heavy chain variable domain comprising the amino acid sequence of SEQ ID NO:792 and a light chain variable domain comprising the amino acid sequence of SEQ ID NO:797; or 2) a heavy chain variable domain comprising a CDR1 comprising the amino acid sequence of SEQ ID NO:793, a CDR2 comprising the amino acid sequence of SEQ ID NO:794, and a CDR3 comprising the amino acid sequence of SEQ ID NO:795 and alight chain variable domain comprising a CDR1 comprising the amino acid sequence of SEQ ID NO:798, a CDR2 comprising the amino acid sequence of SEQ ID NO:799, and a CDR3 comprising the amino acid sequence of SEQ ID NO:800.

[0162] In one embodiment, the antibody is an isolated COV_2064 antibody. As used herein, the term “COV_2064” refers to a monoclonal antibody, or antigen-binding fragment thereof, that binds to the S2 domain of a coronavirus, such as SARS-CoV-2, wherein the antibody comprises 1) a heavy chain variable domain comprising the amino acid sequence of SEQ ID NO:802 and a light chain variable domain comprising the amino acid sequence of SEQ ID NO:807; or 2) a heavy chain variable domain comprising a CDR1 comprising the amino acid sequence of SEQ ID NO:803, a CDR2 comprising the amino acid sequence of SEQ ID NO:804, and a CDR3 comprising the amino acid sequence of SEQ ID NO:805 and a light chain variable domain comprising a CDR1 comprising the amino acid sequence of SEQ ID NO:808, a CDR2 comprising the amino acid sequence of SEQ ID NO:809, and a CDR3 comprising the amino acid sequence of SEQ ID NO:810.

[0163] In one embodiment, the antibody is an isolated COV_2066 antibody. As used herein, the term “COV_2066” refers to a monoclonal antibody, or antigen-binding fragment thereof, that binds to the S2 domain of a coronavirus, such as SARS-CoV-2, wherein the antibody comprises 1) a heavy chain variable domain comprising the amino acid sequence of SEQ ID NO:812 and a light chain variable domain comprising the amino acid sequence of SEQ ID NO:817; or 2) a heavy chain variable domain comprising a CDR1 comprising the amino acid sequence of SEQ ID NO:813, a CDR2 comprising the amino acid sequence of SEQ ID NO:814, and a CDR3 comprising the amino acid sequence of SEQ ID NO:815 and a light chain variable domain comprising a CDR1 comprising the amino acid sequence of SEQ ID NO:818, a CDR2 comprising the amino acid sequence of SEQ ID NO:819, and a CDR3 comprising the amino acid sequence of SEQ ID NO: 820.

[0164] In one embodiment, the antibody is an isolated COV_2077 antibody. As used herein, the term “COV_2077” refers to a monoclonal antibody, or antigen-binding fragment thereof, that binds to the S2 domain of a coronavirus, such as SARS-CoV-2, wherein the antibody comprises 1) a heavy chain variable domain comprising the amino acid sequence of SEQ ID NO:822 and a light chain variable domain comprising the amino acid sequence of SEQ ID NO:827; or 2) a heavy chain variable domain comprising a CDR1 comprising the amino acid sequence of SEQ ID NO:823, a CDR2 comprising the amino acid sequence of SEQ ID NO:824, and a CDR3 comprising the amino acid sequence of SEQ ID NO:825 and a light chain variable domain comprising a CDR1 comprising the amino acid sequence of SEQ ID NO:828, a CDR2 comprising the amino acid sequence of SEQ ID NO:829, and a CDR3 comprising the amino acid sequence of SEQ ID NO:830.

[0165] In one embodiment, the antibody is an isolated COV_2093 antibody. As used herein, the term “COV_2093” refers to a monoclonal antibody, or antigen-binding fragment thereof, that binds to the S2 domain of a coronavirus, such as SARS-CoV-2, wherein the antibody comprises 1) a heavy chain variable domain comprising the amino acid sequence of SEQ ID NO:832 and a light chain variable domain comprising the amino acid sequence of SEQ ID NO:837; or 2) a heavy chain variable domain comprising a CDR1 comprising the amino acid sequence of SEQ ID NO:833, a CDR2 comprising the amino acid sequence of SEQ ID NO:834, and a CDR3 comprising the amino acid sequence of SEQ ID NO:835 and a light chain variable domain comprising a CDR1 comprising the amino acid sequence of SEQ ID NO:838, a CDR2 comprising the amino acid sequence of SEQ ID NO:839, and a CDR3 comprising the amino acid sequence of SEQ ID NO:840.

[0166] In one embodiment, the antibody is an isolated COV_2137 antibody. As used herein, the term “COV_2137” refers to a monoclonal antibody, or antigen-binding fragment thereof, that binds to the S1 NTD domain of a coronavirus, such as SARS-CoV-2, wherein the antibody comprises 1) a heavy chain variable domain comprising the amino acid sequence of SEQ ID NO:842 and a light chain variable domain comprising the amino acid sequence of SEQ ID NO: 847; or 2) a heavy chain variable domain comprising a CDR1 comprising the amino acid sequence of SEQ ID NO:843, a CDR2 comprising the amino acid sequence of SEQ ID NO:844, and a CDR3 comprising the amino acid sequence of SEQ ID NO:845 and a light chain variable domain comprising a CDR1 comprising the amino acid sequence of SEQ ID NO:848, a CDR2 comprising the amino acid sequence of SEQ ID NO:849, and a CDR3 comprising the amino acid sequence of SEQ ID NO:850; or 3) a heavy chain variable domain comprising a CDR1 comprising the amino acid sequence of SEQ ID NO:1117, a CDR2 comprising the amino acid sequence of SEQ ID NO: 1147, and a CDR3 comprising the amino acid sequence of SEQ ID NO: 1177 and a light chain variable domain comprising a CDR1 comprising the amino acid sequence of SEQ ID NO: 1207, a CDR2 comprising the amino acid sequence EVN, and a CDR3 comprising the amino acid sequence of SEQ ID NO: 1237.

[0167] In one embodiment, the antibody is an isolated COV_2143 antibody. As used herein, the term “COV_2143” refers to a monoclonal antibody, or antigen-binding fragment thereof, that binds to the S2 domain of a coronavirus, such as SARS-CoV-2, wherein the antibody comprises 1) a heavy chain variable domain comprising the amino acid sequence of SEQ ID NO:852 and a light chain variable domain comprising the amino acid sequence of SEQ ID NO:857; or 2) a heavy chain variable domain comprising a CDR1 comprising the amino acid sequence of SEQ ID NO:853, a CDR2 comprising the amino acid sequence of SEQ ID NO:854, and a CDR3 comprising the amino acid sequence of SEQ ID NO:855 and a light chain variable domain comprising a CDR1 comprising the amino acid sequence of SEQ ID NO:858, a CDR2 comprising the amino acid sequence of SEQ ID NO:859, and a CDR3 comprising the amino acid sequence of SEQ ID NO:860.

[0168] In one embodiment, the antibody is an isolated COV_2169 antibody. As used herein, the term “COV_2169” refers to a monoclonal antibody, or antigen-binding fragment thereof, that binds to the S2 domain of a coronavirus, such as SARS-CoV-2, wherein the antibody comprises 1) a heavy chain variable domain comprising the amino acid sequence of SEQ ID NO:862 and a light chain variable domain comprising the amino acid sequence of SEQ ID NO:867; or 2) a heavy chain variable domain comprising a CDR1 comprising the amino acid sequence of SEQ ID NO:863, a CDR2 comprising the amino acid sequence of SEQ ID NO:864, and a CDR3 comprising the amino acid sequence of SEQ ID NO:865 and a light chain variable domain comprising a CDR1 comprising the amino acid sequence of SEQ ID NO:868, a CDR2 comprising the amino acid sequence of SEQ ID NO:869, and a CDR3 comprising the amino acid sequence of SEQ ID NO: 870.

[0169] In one embodiment, the antibody is an isolated COV_2172 antibody. As used herein, the term “COV_2172” refers to a monoclonal antibody, or antigen-binding fragment thereof, that binds to the S1 RBD domain of a coronavirus, such as SARS-CoV-2, wherein the antibody comprises 1) a heavy chain variable domain comprising the amino acid sequence of SEQ ID NO:872 and a light chain variable domain comprising the amino acid sequence of SEQ ID NO:877; or 2) a heavy chain variable domain comprising a CDR1 comprising the amino acid sequence of SEQ ID NO:873, a CDR2 comprising the amino acid sequence of SEQ ID NO:874, and a CDR3 comprising the amino acid sequence of SEQ ID NO:875 and a light chain variable domain comprising a CDR1 comprising the amino acid sequence of SEQ ID NO:878, a CDR2 comprising the amino acid sequence of SEQ ID NO:879, and a CDR3 comprising the amino acid sequence of SEQ ID NO:880; or 3) a heavy chain variable domain comprising a CDR1 comprising the amino acid sequence of SEQ ID NO:1127, a CDR2 comprising the amino acid sequence of SEQ ID NO: 1157, and a CDR3 comprising the amino acid sequence of SEQ ID NO: 1187 and a light chain variable domain comprising a CDR1 comprising the amino acid sequence of SEQ ID NO: 1217, a CDR2 comprising the amino acid sequence DVS, and a CDR3 comprising the amino acid sequence of SEQ ID NO: 1247.

[0170] In one embodiment, the antibody is an isolated COV_2174 antibody. As used herein, the term “COV_2174” refers to a monoclonal antibody, or antigen-binding fragment thereof, that binds to the S1 RBD domain of a coronavirus, such as SARS-CoV-2, wherein the antibody comprises 1) a heavy chain variable domain comprising the amino acid sequence of SEQ ID NO:882 and a light chain variable domain comprising the amino acid sequence of SEQ ID NO:887; or 2) a heavy chain variable domain comprising a CDR1 comprising the amino acid sequence of SEQ ID NO:883, a CDR2 comprising the amino acid sequence of SEQ ID NO:884, and a CDR3 comprising the amino acid sequence of SEQ ID NO:885 and alight chain variable domain comprising a CDR1 comprising the amino acid sequence of SEQ ID NO:888, a CDR2 comprising the amino acid sequence of SEQ ID NO:889, and a CDR3 comprising the amino acid sequence of SEQ ID NO:890; or 3) a heavy chain variable domain comprising a CDR1 comprising the amino acid sequence of SEQ ID NO:1129, a CDR2 comprising the amino acid sequence of SEQ ID NO: 1159, and a CDR3 comprising the amino acid sequence of SEQ ID NO: 1189 and a light chain variable domain comprising a CDR1 comprising the amino acid sequence of SEQ ID NO: 1219, a CDR2 comprising the amino acid sequence AAS, and a CDR3 comprising the amino acid sequence of SEQ ID NO: 1249.

[0171] In one embodiment, the antibody is an isolated COV_2205 antibody. As used herein, the term “COV_2205” refers to a monoclonal antibody, or antigen-binding fragment thereof, that binds to the S2 domain of a coronavirus, such as SARS-CoV-2, wherein the antibody comprises 1) a heavy chain variable domain comprising the amino acid sequence of SEQ ID NO:892 and a light chain variable domain comprising the amino acid sequence of SEQ ID NO:897; or 2) a heavy chain variable domain comprising a CDR1 comprising the amino acid sequence of SEQ ID NO:893, a CDR2 comprising the amino acid sequence of SEQ ID NO:894, and a CDR3 comprising the amino acid sequence of SEQ ID NO:895 and a light chain variable domain comprising a CDR1 comprising the amino acid sequence of SEQ ID NO:898, a CDR2 comprising the amino acid sequence of SEQ ID NO:899, and a CDR3 comprising the amino acid sequence of SEQ ID NO:900.

[0172] In one embodiment, the antibody is an isolated COV_2215 antibody. As used herein, the term “COV_2215” refers to a monoclonal antibody, or antigen-binding fragment thereof, that binds to the S2 domain of a coronavirus, such as SARS-CoV-2, wherein the antibody comprises 1) a heavy chain variable domain comprising the amino acid sequence of SEQ ID NO:902 and a light chain variable domain comprising the amino acid sequence of SEQ ID NO:907; or 2) a heavy chain variable domain comprising a CDR1 comprising the amino acid sequence of SEQ ID NO:903, a CDR2 comprising the amino acid sequence of SEQ ID NO:904, and a CDR3 comprising the amino acid sequence of SEQ ID NO:905 and alight chain variable domain comprising a CDR1 comprising the amino acid sequence of SEQ ID NO:908, a CDR2 comprising the amino acid sequence of SEQ ID NO:909, and a CDR3 comprising the amino acid sequence of SEQ ID NO:910.

[0173] In one embodiment, the antibody is an isolated COV_3049 antibody. As used herein, the term “COV_3049” refers to a monoclonal antibody, or antigen-binding fragment thereof, that binds to the S2 domain of a coronavirus, such as SARS-CoV-2, wherein the antibody comprises 1) a heavy chain variable domain comprising the amino acid sequence of SEQ ID NO:912 and a light chain variable domain comprising the amino acid sequence of SEQ ID NO:917; or 2) a heavy chain variable domain comprising a CDR1 comprising the amino acid sequence of SEQ ID NO:913, a CDR2 comprising the amino acid sequence of SEQ ID NO:914, and a CDR3 comprising the amino acid sequence of SEQ ID NO:915 and alight chain variable domain comprising a CDR1 comprising the amino acid sequence of SEQ ID NO:918, a CDR2 comprising the amino acid sequence of SEQ ID NO:919, and a CDR3 comprising the amino acid sequence of SEQ ID NO:920.

[0174] In one embodiment, the antibody is an isolated COV_3069 antibody. As used herein, the term “COV_3069” refers to a monoclonal antibody, or antigen-binding fragment thereof, that binds to the S1 domain, S1 RBD domain, S1 NTD domain, or S2 domain of a coronavirus, such as SARS-CoV-2, wherein the antibody comprises 1) a heavy chain variable domain comprising the amino acid sequence of SEQ ID NO:922 and a light chain variable domain comprising the amino acid sequence of SEQ ID NO:927; or 2) a heavy chain variable domain comprising a CDR1 comprising the amino acid sequence of SEQ ID NO:923, a CDR2 comprising the amino acid sequence of SEQ ID NO:924, and a CDR3 comprising the amino acid sequence of SEQ ID NO:925 and a light chain variable domain comprising a CDR1 comprising the amino acid sequence of SEQ ID NO:928, a CDR2 comprising the amino acid sequence of SEQ ID NO:929, and a CDR3 comprising the amino acid sequence of SEQ ID NO:930.

[0175] In one embodiment, the antibody is an isolated COV_3077 antibody. As used herein, the term “COV_3077” refers to a monoclonal antibody, or antigen-binding fragment thereof, that binds to the S2 domain of a coronavirus, such as SARS-CoV-2, wherein the antibody comprises 1) a heavy chain variable domain comprising the amino acid sequence of SEQ ID NO:932 and a light chain variable domain comprising the amino acid sequence of SEQ ID NO:937; or 2) a heavy chain variable domain comprising a CDR1 comprising the amino acid sequence of SEQ ID NO:933, a CDR2 comprising the amino acid sequence of SEQ ID NO:934, and a CDR3 comprising the amino acid sequence of SEQ ID NO:935 and alight chain variable domain comprising a CDR1 comprising the amino acid sequence of SEQ ID NO:938, a CDR2 comprising the amino acid sequence of SEQ ID NO:939, and a CDR3 comprising the amino acid sequence of SEQ ID NO:940.

[0176] In one embodiment, the antibody is an isolated COV_3079 antibody. As used herein, the term “COV_3079” refers to a monoclonal antibody, or antigen-binding fragment thereof, that binds to the S2 domain of a coronavirus, such as SARS-CoV-2, wherein the antibody comprises 1) a heavy chain variable domain comprising the amino acid sequence of SEQ ID NO:942 and a light chain variable domain comprising the amino acid sequence of SEQ ID NO:947; or 2) a heavy chain variable domain comprising a CDR1 comprising the amino acid sequence of SEQ ID NO:943, a CDR2 comprising the amino acid sequence of SEQ ID NO:944, and a CDR3 comprising the amino acid sequence of SEQ ID NO:945 and alight chain variable domain comprising a CDR1 comprising the amino acid sequence of SEQ ID NO:948, a CDR2 comprising the amino acid sequence of SEQ ID NO:949, and a CDR3 comprising the amino acid sequence of SEQ ID NO:950.

[0177] In one embodiment, the antibody is an isolated COV_3100 antibody. As used herein, the term “COV_3100” refers to a monoclonal antibody, or antigen-binding fragment thereof, that binds to the S2 domain of a coronavirus, such as SARS-CoV-2, wherein the antibody comprises 1) a heavy chain variable domain comprising the amino acid sequence of SEQ ID NO:952 and a light chain variable domain comprising the amino acid sequence of SEQ ID NO:957; or 2) a heavy chain variable domain comprising a CDR1 comprising the amino acid sequence of SEQ ID NO:953, a CDR2 comprising the amino acid sequence of SEQ ID NO:954, and a CDR3 comprising the amino acid sequence of SEQ ID NO:955 and alight chain variable domain comprising a CDR1 comprising the amino acid sequence of SEQ ID NO:958, a CDR2 comprising the amino acid sequence of SEQ ID NO:959, and a CDR3 comprising the amino acid sequence of SEQ ID NO:960.

[0178] In one embodiment, the antibody is an isolated COV_3103 antibody. As used herein, the term “COV_3103” refers to a monoclonal antibody, or antigen-binding fragment thereof, that binds to the S2 domain of a coronavirus, such as SARS-CoV-2, wherein the antibody comprises 1) a heavy chain variable domain comprising the amino acid sequence of SEQ ID NO:962 and a light chain variable domain comprising the amino acid sequence of SEQ ID NO:967; or 2) a heavy chain variable domain comprising a CDR1 comprising the amino acid sequence of SEQ ID NO:963, a CDR2 comprising the amino acid sequence of SEQ ID NO:964, and a CDR3 comprising the amino acid sequence of SEQ ID NO:965 and alight chain variable domain comprising a CDR1 comprising the amino acid sequence of SEQ ID NO:968, a CDR2 comprising the amino acid sequence of SEQ ID NO:969, and a CDR3 comprising the amino acid sequence of SEQ ID NO:970.

[0179] In one embodiment, the antibody is an isolated COV_3129 antibody. As used herein, the term “COV_3129” refers to a monoclonal antibody, or antigen-binding fragment thereof, that binds to the S1 domain of a coronavirus, such as SARS-CoV-2, wherein the antibody comprises 1) a heavy chain variable domain comprising the amino acid sequence of SEQ ID NO:972 and a light chain variable domain comprising the amino acid sequence of SEQ ID NO:977; or 2) a heavy chain variable domain comprising a CDR1 comprising the amino acid sequence of SEQ ID NO:973, a CDR2 comprising the amino acid sequence of SEQ ID NO:974, and a CDR3 comprising the amino acid sequence of SEQ ID NO:975 and a light chain variable domain comprising a CDR1 comprising the amino acid sequence of SEQ ID NO:978, a CDR2 comprising the amino acid sequence of SEQ ID NO:979, and a CDR3 comprising the amino acid sequence of SEQ ID NO:980.

[0180] In one embodiment, the antibody is an isolated COV_3137 antibody. As used herein, the term “COV_3137” refers to a monoclonal antibody, or antigen-binding fragment thereof, that binds to the S1 domain of a coronavirus, such as SARS-CoV-2, wherein the antibody comprises 1) a heavy chain variable domain comprising the amino acid sequence of SEQ ID NO:982 and a light chain variable domain comprising the amino acid sequence of SEQ ID NO:987; or 2) a heavy chain variable domain comprising a CDR1 comprising the amino acid sequence of SEQ ID NO:983, a CDR2 comprising the amino acid sequence of SEQ ID NO:984, and a CDR3 comprising the amino acid sequence of SEQ ID NO:985 and alight chain variable domain comprising a CDR1 comprising the amino acid sequence of SEQ ID NO:988, a CDR2 comprising the amino acid sequence of SEQ ID NO:989, and a CDR3 comprising the amino acid sequence of SEQ ID NO:990.

[0181] In one embodiment, the antibody is an isolated COV_2038 antibody. As used herein, the term “COV_2038” refers to a monoclonal antibody, or antigen-binding fragment thereof, that binds to the NTD of a coronavirus, such as SARS-CoV-2, wherein the antibody comprises a heavy chain variable domain comprising a CDR1 comprising the amino acid sequence of SEQ ID NO:1119, a CDR2 comprising the amino acid sequence of SEQ ID NO: 1149, and a CDR3 comprising the amino acid sequence of SEQ ID NO: 1179 and a light chain variable domain comprising a CDR1 comprising the amino acid sequence of SEQ ID NO: 1209, a CDR2 comprising the amino acid sequence QDT, and a CDR3 comprising the amino acid sequence of SEQ ID NO: 1239.

[0182] Modified Antibodies

[0183] Modified versions of COV_1007, COV_1037, COV_1045, COV_1046, COV_1201, COV_2004, COV_2008, COV_2014, COV_2018, COV_2024, COV_2025, COV_2027, COV_2028, COV_2035, COV_2037, COV_2038, COV_2039, COV_2054, COV_2056, COV_2057, COV_2063, COV_2091, COV_2100, COV_2103, COV_2108, COV_2123, COV_2125, COV_2134, COV_2151, COV_2165, COV_2172, COV_2173, COV_2193, COV_2196, COV_3000, COV_3005, COV_3013, COV_3019, COV_3028, COV_3031, COV_3033, COV_3037, COV_3040, COV_3043, COV_3053, COV_3088, COV_1012, COV_1025, COV_1032, COV_1050, COV_1056, COV_1060, COV_1063, COV_1071, COV_1076, COV_1082, COV_1085, COV_1086, COV_1087, COV_1097, COV_1116, COV_1118, COV_1122, COV_1131, COV_1136, COV_1144, COV_1145, COV_1149, COV_1151, COV_1154, COV_1165, COV_1166, COV_1170, COV_1172, COV_1177, COV_1184, COV_1198, COV_2032, COV_2048, COV_2055, COV_2056, COV_2064, COV_2066, COV_2077, COV_2093, COV_2137, COV_2143, COV_2169, COV_2172, COV_2174, COV_2205, COV_2215, COV_3049, COV_3069, COV_3077, COV_3079, COV_3100, COV_3103, COV_3129, or COV_3137 antibodies are also provided. Typically, modifications to an antibody can be introduced through the nucleic acids that encode the heavy or light chain variable domains of the antibody. These modifications can include deletions, insertions, point mutations, truncations, and amino acid substitutions and addition of amino acids or non-amino acid moieties. For example, random mutagenesis of the disclosed V_{H} or V_{L} sequences can be used to generate variant V_{H} or V_{L} domains still capable of binding a coronavirus. A technique using error-prone PCR is described by Gram et al. (Proc. Nat. Acad. Sci. U.S.A. (1992) 89: 3576-3580). Another method uses direct mutagenesis of the disclosed V_{H} or V_{L} sequences. Such techniques are disclosed by Barbas et al. (Proc. Nat. Acad. Sci. U.S.A. (1994) 91: 3809-3813) and Schier et al. (J. Mol. Biol. (1996) 263: 551-567). Modifications can also be made directly to the amino acid sequence, such as by cleavage, addition of a linker molecule or addition of a detectable moiety, such as biotin, addition of a fatty acid, and the like.

[0184] In one embodiment, the antibody is a monoclonal antibody that binds to a coronavirus, such as SARS_CoV-2, and comprises 1) a heavy chain variable domain that is at least about 70%, at least about 80%, at least about 90%, at least about 95%, at least about 98% identical, or 100% identical to the amino acid sequence of the heavy chain variable domain of the COV_1007, COV_1037, COV_1045, COV_1046, COV_1201, COV_2004, COV_2008, COV_2014, COV_2018, COV_2024, COV_2025, COV_2027, COV_2028, COV_2035, COV_2037, COV_2038, COV_2039, COV_2054, COV_2056, COV_2057, COV_2063, COV_2091, COV_2100, COV_2103, COV_2108, COV_2123, COV_2125, COV_2134, COV_2151, COV_2165, COV_2172, COV_2173, COV_2193, COV_2196, COV_3000, COV_3005, COV_3013, COV_3019, COV_3028, COV_3031, COV_3033, COV_3037, COV_3040, COV_3043, COV_3053, COV_3088, COV_1012, COV_1025, COV_1032, COV_1050, COV_1056, COV_1060, COV_1063, COV_1071, COV_1076, COV_1082, COV_1085, COV_1086, COV_1087, COV_1097, COV_1116, COV_1118, COV_1122, COV_1131, COV_1136, COV_1144, COV_1145, COV_1149, COV_1151, COV_1154, COV_1165, COV_1166, COV_1170, COV_1172, COV_1177, COV_1184, COV_1198, COV_2032, COV_2048, COV_2055, COV_2056, COV_2064, COV_2066, COV_2077, COV_2093, COV_2137, COV_2143, COV_2169, COV_2172, COV_2174, COV_2205, COV_2215, COV_3049, COV_3069, COV_3077, COV_3079, COV_3100, COV_3103, COV_3129, or COV_3137 antibody as described herein, and 2) a light chain variable domain that is at least about 70%, at least about 80%, at least about 90%, at least about 95%, at least about 98% identical, or 100% identical to the amino acid sequence of the light chain variable domain of the COV_1007, COV_1037, COV_1045, COV_1046, COV_1201, COV_2004, COV_2008, COV_2014, COV_2018, COV_2024, COV_2025, COV_2027, COV_2028, COV_2035, COV_2037, COV_2038, COV_2039, COV_2054, COV_2056, COV_2057, COV_2063, COV_2091, COV_2100, COV_2103, COV_2108, COV_2123, COV_2125, COV_2134, COV_2151, COV_2165, COV_2172, COV_2173, COV_2193, COV_2196, COV_3000, COV_3005, COV_3013, COV_3019, COV_3028, COV_3031, COV_3033, COV_3037, COV_3040, COV_3043, COV_3053, COV_3088, COV_1012, COV_1025, COV_1032, COV_1050, COV_1056, COV_1060, COV_1063, COV_1071, COV_1076, COV_1082, COV_1085, COV_1086, COV_1087, COV_1097, COV_1116, COV_1118, COV_1122, COV_1131, COV_1136, COV_1144, COV_1145, COV_1149, COV_1151, COV_1154, COV_1165, COV_1166, COV_1170, COV_1172, COV_1177, COV_1184, COV_1198, COV_2032, COV_2048, COV_2055, COV_2056, COV_2064, COV_2066, COV_2077, COV_2093, COV_2137, COV_2143, COV_2169, COV_2172, COV_2174, COV_2205, COV_2215, COV_3049, COV_3069, COV_3077, COV_3079, COV_3100, COV_3103, COV_3129, or COV_3137 antibody, as described herein.

[0185] In another embodiment, the monoclonal antibody binds to a coronavirus, such as SARS_CoV-2, and comprises six CDRs (H1, H2, H3, L1, L2, and L3) that are at least about 90%, at least about 95% or at least about 98% identical to the amino acid sequences of the six CDRs (H1, H2, H3, L1, L2, and L3) of the heavy and light chain variable domains of the COV_1007, COV_1037, COV_1045, COV_1046, COV_1201, COV_2004, COV_2008, COV_2014, COV_2018, COV_2024, COV_2025, COV_2027, COV_2028, COV_2035, COV_2037, COV_2038, COV_2039, COV_2054, COV_2056, COV_2057, COV_2063, COV_2091, COV_2100, COV_2103, COV_2108, COV_2123, COV_2125, COV_2134, COV_2151, COV_2165, COV_2172, COV_2173, COV_2193, COV_2196, COV_3000, COV_3005, COV_3013, COV_3019, COV_3028, COV_3031, COV_3033, COV_3037, COV_3040, COV_3043, COV_3053, COV_3088, COV_1012, COV_1025, COV_1032, COV_1050, COV_1056, COV_1060, COV_1063, COV_1071, COV_1076, COV_1082, COV_1085, COV_1086, COV_1087, COV_1097, COV_1116, COV_1118, COV_1122, COV_1131, COV_1136, COV_1144, COV_1145, COV_1149, COV_1151, COV_1154, COV_1165, COV_1166, COV_1170, COV_1172, COV_1177, COV_1184, COV_1198, COV_2032, COV_2048, COV_2055, COV_2056, COV_2064, COV_2066, COV_2077, COV_2093, COV_2137, COV_2143, COV_2169, COV_2172, COV_2174, COV_2205, COV_2215, COV_3049, COV_3069, COV_3077, COV_3079, COV_3100, COV_3103, COV_3129, or COV_3137 antibody.

[0186] In another embodiment, the monoclonal antibody binds to a coronavirus, such as SARS_CoV-2, and comprises a heavy chain variable domain identical to the heavy chain variable domain sequences of the COV_1007, COV_1037, COV_1045, COV_1046, COV_1201, COV_2004, COV_2008, COV_2014, COV_2018, COV_2024, COV_2025, COV_2027, COV_2028, COV_2035, COV_2037, COV_2038, COV_2039, COV_2054, COV_2056, COV_2057, COV_2063, COV_2091, COV_2100, COV_2103, COV_2108, COV_2123, COV_2125, COV_2134, COV_2151, COV_2165, COV_2172, COV_2173, COV_2193, COV_2196, COV_3000, COV_3005, COV_3013, COV_3019, COV_3028, COV_3031, COV_3033, COV_3037, COV_3040, COV_3043, COV_3053, COV_3088, COV_1012, COV_1025, COV_1032, COV_1050, COV_1056, COV_1060, COV_1063, COV_1071, COV_1076, COV_1082, COV_1085, COV_1086, COV_1087, COV_1097, COV_1116, COV_1118, COV_1122, COV_1131, COV_1136, COV_1144, COV_1145, COV_1149, COV_1151, COV_1154, COV_1165, COV_1166, COV_1170, COV_1172, COV_1177, COV_1184, COV_1198, COV_2032, COV_2048, COV_2055, COV_2056, COV_2064, COV_2066, COV_2077, COV_2093, COV_2137, COV_2143, COV_2169, COV_2172, COV_2174, COV_2205, COV_2215, COV_3049, COV_3069, COV_3077, COV_3079, COV_3100, COV_3103, COV_3129, or COV_3137 antibody except for 1, up to 2, up to 3, up to 4, up to 5, up to 6, up to 7, and in certain cases, up to 10 amino acid substitutions in the CDR sequences. In another embodiment, the monoclonal antibody binds to a coronavirus, such as SARS-CoV-2, and comprises a light chain variable domain identical to the light chain variable domain sequences of the COV_1007, COV_1037, COV_1045, COV_1046, COV_1201, COV_2004, COV_2008, COV_2014, COV_2018, COV_2024, COV_2025, COV_2027, COV_2028, COV_2035, COV_2037, COV_2038, COV_2039, COV_2054, COV_2056, COV_2057, COV_2063, COV_2091, COV_2100, COV_2103, COV_2108, COV_2123, COV_2125, COV_2134, COV_2151, COV_2165, COV_2172, COV_2173, COV_2193, COV_2196, COV_3000, COV_3005, COV_3013, COV_3019, COV_3028, COV_3031, COV_3033, COV_3037, COV_3040, COV_3043, COV_3053, COV_3088, COV_1012, COV_1025, COV_1032, COV_1050, COV_1056, COV_1060, COV_1063, COV_1071, COV_1076, COV_1082, COV_1085, COV_1086, COV_1087, COV_1097, COV_1116, COV_1118, COV_1122, COV_1131, COV_1136, COV_1144, COV_1145, COV_1149, COV_1151, COV_1154, COV_1165, COV_1166, COV_1170, COV_1172, COV_1177, COV_1184, COV_1198, COV_2032, COV_2048, COV_2055, COV_2056, COV_2064, COV_2066, COV_2077, COV_2093, COV_2137, COV_2143, COV_2169, COV_2172, COV_2174, COV_2205, COV_2215, COV_3049, COV_3069, COV_3077, COV_3079, COV_3100, COV_3103, COV_3129, or COV_3137 except for 1, up to 2, up to 3, up to 4, up to 5, up to 6, up to 7, and in certain cases, up to 10 amino acid substitutions in the CDR sequences.

[0187] The specific amino acid positions that can be substituted in a CDR, as well as the donor amino acid that can be substituted into those positions can be readily determined by one of skill in the art using known methods, such as those disclosed in published U.S. Application 2006/0099204, the disclosure of which is hereby incorporated by reference in its entirety. Typically, this involves substitution of an amino acid with an amino acid having similar charge, hydrophobic, or stereochemical characteristics. More drastic substitutions in FR regions, in contrast to CDR regions, may also be made as long as they do not adversely affect (e.g., reduce affinity by more than 50% as compared to unsubstituted antibody) the binding properties of the antibody.

[0188] Modified versions of the COV_1007, COV_1037, COV_1045, COV_1046, COV_1201, COV_2004, COV_2008, COV_2014, COV_2018, COV_2024, COV_2025, COV_2027, COV_2028, COV_2035, COV_2037, COV_2038, COV_2039, COV_2054, COV_2056, COV_2057, COV_2063, COV_2091, COV_2100, COV_2103, COV_2108, COV_2123, COV_2125, COV_2134, COV_2151, COV_2165, COV_2172, COV_2173, COV_2193, COV_2196, COV_3000, COV_3005, COV_3013, COV_3019, COV_3028, COV_3031, COV_3033, COV_3037, COV_3040, COV_3043, COV_3053, COV_3088, COV_1012, COV_1025, COV_1032, COV_1050, COV_1056, COV_1060, COV_1063, COV_1071, COV_1076, COV_1082, COV_1085, COV_1086, COV_1087, COV_1097, COV_1116, COV_1118, COV_1122, COV_1131, COV_1136, COV_1144, COV_1145, COV_1149, COV_1151, COV_1154, COV_1165, COV_1166, COV_1170, COV_1172, COV_1177, COV_1184, COV_1198, COV_2032, COV_2048, COV_2055, COV_2056, COV_2064, COV_2066, COV_2077, COV_2093, COV_2137, COV_2143, COV_2169, COV_2172, COV_2174, COV_2205, COV_2215, COV_3049, COV_3069, COV_3077, COV_3079, COV_3100, COV_3103, COV_3129, or COV_3137 antibodies can also be screened to identify which mutation provides a modified antibody that retains a desired property, such as high affinity binding of the parent antibody for either coronavirus, e.g., SARS-CoV-2, and/or potent neutralizing activity.

[0189] Nucleic Acids, Cloning and Expression Systems

[0190] The present disclosure further provides isolated nucleic acids encoding the COV_1007, COV_1037, COV_1045, COV_1046, COV_1201, COV_2004, COV_2008, COV_2014, COV_2018, COV_2024, COV_2025, COV_2027, COV_2028, COV_2035, COV_2037, COV_2038, COV_2039, COV_2054, COV_2056, COV_2057, COV_2063, COV_2091, COV_2100, COV_2103, COV_2108, COV_2123, COV_2125, COV_2134, COV_2151, COV_2165, COV_2172, COV_2173, COV_2193, COV_2196, COV_3000, COV_3005, COV_3013, COV_3019, COV_3028, COV_3031, COV_3033, COV_3037, COV_3040, COV_3043, COV_3053, COV_3088, COV_1012, COV_1025, COV_1032, COV_1050, COV_1056, COV_1060, COV_1063, COV_1071, COV_1076, COV_1082, COV_1085, COV_1086, COV_1087, COV_1097, COV_1116, COV_1118, COV_1122, COV_1131, COV_1136, COV_1144, COV_1145, COV_1149, COV_1151, COV_1154, COV_1165, COV_1166, COV_1170, COV_1172, COV_1177, COV_1184, COV_1198, COV_2032, COV_2048, COV_2055, COV_2056, COV_2064, COV_2066, COV_2077, COV_2093, COV_2137, COV_2143, COV_2169, COV_2172, COV_2174, COV_2205, COV_2215, COV_3049, COV_3069, COV_3077, COV_3079, COV_3100, COV_3103, COV_3129, or COV_3137 antibodies or antigen-binding fragments thereof. The nucleic acids may comprise DNA or RNA and may be wholly or partially synthetic or recombinant. Reference to a nucleotide sequence as set out herein encompasses a DNA molecule with the specified sequence, and encompasses a RNA molecule with the specified sequence in which U is substituted for T, unless context requires otherwise.

[0191] The nucleic acids provided herein encode at least one CDR, all six CDRs (i.e., H1, H2, H3, L1, L2, and L3), a V_{H} domain, and/or a V_{L} domain of one of the COV_1007, COV_1037, COV_1045, COV_1046, COV_1201, COV_2004, COV_2008, COV_2014, COV_2018, COV_2024, COV_2025, COV_2027, COV_2028, COV_2035, COV_2037, COV, 2038, COV_2039, COV_2054, COV_2056, COV_2057, COV_2063, COV_2091, COV_2100, COV_2103, COV_2108, COV_2123, COV_2125, COV_2134, COV_2151, COV_2165, COV_2172, COV_2173, COV_2193, COV_2196, COV_3000, COV_3005, COV_3013, COV_3019, COV_3028, COV_3031, COV_3033, COV_3037, COV_3040, COV_3043, COV_3053, COV_3088, COV_1012, COV_1025, COV_1032, COV_1050, COV_1056, COV_1060, COV_1063, COV_1071, COV_1076, COV_1082, COV_1085, COV_1086, COV_1087, COV_1097, COV_1116, COV_1118, COV_1122, COV_1131, COV_1136, COV_1144, COV_1145, COV_1149, COV_1151, COV_1154, COV_1165, COV_1166, COV_1170, COV_1172, COV_1177, COV_1184, COV_1198, COV_2032, COV_2048, COV_2055, COV_2056, COV_2064, COV_2066, COV_2077, COV_2093, COV_2137, COV_2143, COV_2169, COV_2172, COV_2174, COV_2205, COV_2215, COV_3049, COV_3069, COV_3077, COV_3079, COV_3100, COV_3103, COV_3129, or COV_3137 antibodies.

[0192] For example, in some embodiments, the disclosure provides an isolated nucleic acid that encodes the heavy chain variable domain of the COV_1007 antibody, wherein the isolated nucleic acid comprises SEQ ID NO: 1 and/or the isolated nucleic acid encodes the light chain variable domain of the of the COV_1007 antibody, wherein the isolated nucleic acid comprises SEQ ID NO: 6.

[0193] In some embodiments, the disclosure provides an isolated nucleic acid that encodes the heavy chain variable domain of the COV_1037 antibody, wherein the isolated nucleic acid comprises SEQ ID NO: 11 and/or the isolated nucleic acid encodes the light chain variable domain of the of the COV_1037 antibody, wherein the isolated nucleic acid comprises SEQ ID NO: 16.

[0194] In some embodiments, the disclosure provides an isolated nucleic acid that encodes the heavy chain variable domain of the COV_1045 antibody, wherein the isolated nucleic acid comprises SEQ ID NO: 21 and/or the isolated nucleic acid encodes the light chain variable domain of the of the COV_1045 antibody, wherein the isolated nucleic acid comprises SEQ ID NO: 26.

[0195] In some embodiments, the disclosure provides an isolated nucleic acid that encodes the heavy chain variable domain of the COV_1046 antibody, wherein the isolated nucleic acid comprises SEQ ID NO: 31 and/or the isolated nucleic acid encodes the light chain variable domain of the of the COV_1046 antibody, wherein the isolated nucleic acid comprises SEQ ID NO: 36.

[0196] In some embodiments, the disclosure provides an isolated nucleic acid that encodes the heavy chain variable domain of the COV_1201 antibody, wherein the isolated nucleic acid comprises SEQ ID NO: 41 and/or the isolated nucleic acid encodes the light chain variable domain of the of the COV_1201 antibody, wherein the isolated nucleic acid comprises SEQ ID NO: 46.

[0197] In some embodiments, the disclosure provides an isolated nucleic acid that encodes the heavy chain variable domain of the COV_2004 antibody, wherein the isolated nucleic acid comprises SEQ ID NO: 51 and/or the isolated nucleic acid encodes the light chain variable domain of the of the COV_2004 antibody, wherein the isolated nucleic acid comprises SEQ ID NO: 56.

[0198] In some embodiments, the disclosure provides an isolated nucleic acid that encodes the heavy chain variable domain of the COV_2008 antibody, wherein the isolated nucleic acid comprises SEQ ID NO: 61 and/or the isolated nucleic acid encodes the light chain variable domain of the of the COV_2008 antibody, wherein the isolated nucleic acid comprises SEQ ID NO: 66.

[0199] In some embodiments, the disclosure provides an isolated nucleic acid that encodes the heavy chain variable domain of the COV_2014 antibody, wherein the isolated nucleic acid comprises SEQ ID NO: 71 and/or the isolated nucleic acid encodes the light chain variable domain of the of the COV_2014 antibody, wherein the isolated nucleic acid comprises SEQ ID NO: 76.

[0200] In some embodiments, the disclosure provides an isolated nucleic acid that encodes the heavy chain variable domain of the COV_2018 antibody, wherein the isolated nucleic acid comprises SEQ ID NO: 81 and/or the isolated nucleic acid encodes the light chain variable domain of the of the COV_2018 antibody, wherein the isolated nucleic acid comprises SEQ ID NO:86.

[0201] In some embodiments, the disclosure provides an isolated nucleic acid that encodes the heavy chain variable domain of the COV_2024 antibody, wherein the isolated nucleic acid comprises SEQ ID NO: 91 and/or the isolated nucleic acid encodes the light chain variable domain of the of the COV_2024 antibody, wherein the isolated nucleic acid comprises SEQ ID NO: 96.

[0202] In some embodiments, the disclosure provides an isolated nucleic acid that encodes the heavy chain variable domain of the COV_2025 antibody, wherein the isolated nucleic acid comprises SEQ ID NO: 101 and/or the isolated nucleic acid encodes the light chain variable domain of the of the COV_2025 antibody, wherein the isolated nucleic acid comprises SEQ ID NO: 106.

[0203] In some embodiments, the disclosure provides an isolated nucleic acid that encodes the heavy chain variable domain of the COV_2027 antibody, wherein the isolated nucleic acid comprises SEQ ID NO: 111 and/or the isolated nucleic acid encodes the light chain variable domain of the of the COV_2027 antibody, wherein the isolated nucleic acid comprises SEQ ID NO: 116.

[0204] In some embodiments, the disclosure provides an isolated nucleic acid that encodes the heavy chain variable domain of the COV_2028 antibody, wherein the isolated nucleic acid comprises SEQ ID NO: 121 and/or the isolated nucleic acid encodes the light chain variable domain of the of the COV_2028 antibody, wherein the isolated nucleic acid comprises SEQ ID NO: 126.

[0205] In some embodiments, the disclosure provides an isolated nucleic acid that encodes the heavy chain variable domain of the COV_2035 antibody, wherein the isolated nucleic acid comprises SEQ ID NO: 131 and/or the isolated nucleic acid encodes the light chain variable domain of the of the COV_2035 antibody, wherein the isolated nucleic acid comprises SEQ ID NO: 136.

[0206] In some embodiments, the disclosure provides an isolated nucleic acid that encodes the heavy chain variable domain of the COV_2037 antibody, wherein the isolated nucleic acid comprises SEQ ID NO: 141 and/or the isolated nucleic acid encodes the light chain variable domain of the of the COV_2037 antibody, wherein the isolated nucleic acid comprises SEQ ID NO: 146.

[0207] In some embodiments, the disclosure provides an isolated nucleic acid that encodes the heavy chain variable domain of the COV_2039 antibody, wherein the isolated nucleic acid comprises SEQ ID NO: 151 and/or the isolated nucleic acid encodes the light chain variable domain of the of the COV_2039 antibody, wherein the isolated nucleic acid comprises SEQ ID NO: 156.

[0208] In some embodiments, the disclosure provides an isolated nucleic acid that encodes the heavy chain variable domain of the COV_2054 antibody, wherein the isolated nucleic acid comprises SEQ ID NO: 161 and/or the isolated nucleic acid encodes the light chain variable domain of the of the COV_2054 antibody, wherein the isolated nucleic acid comprises SEQ ID NO: 166.

[0209] In some embodiments, the disclosure provides an isolated nucleic acid that encodes the heavy chain variable domain of the COV_2056 antibody, wherein the isolated nucleic acid comprises SEQ ID NO: 431 and/or the isolated nucleic acid encodes the light chain variable domain of the of the COV_2056 antibody, wherein the isolated nucleic acid comprises SEQ ID NO: 436.

[0210] In some embodiments, the disclosure provides an isolated nucleic acid that encodes the heavy chain variable domain of the COV_2057 antibody, wherein the isolated nucleic acid comprises SEQ ID NO: 171 and/or the isolated nucleic acid encodes the light chain variable domain of the of the COV_2057 antibody, wherein the isolated nucleic acid comprises SEQ ID NO: 176.

[0211] In some embodiments, the disclosure provides an isolated nucleic acid that encodes the heavy chain variable domain of the COV_2063 antibody, wherein the isolated nucleic acid comprises SEQ ID NO: 181 and/or the isolated nucleic acid encodes the light chain variable domain of the of the COV_2063 antibody, wherein the isolated nucleic acid comprises SEQ ID NO:186.

[0212] In some embodiments, the disclosure provides an isolated nucleic acid that encodes the heavy chain variable domain of the COV_2091 antibody, wherein the isolated nucleic acid comprises SEQ ID NO: 191 and/or the isolated nucleic acid encodes the light chain variable domain of the of the COV_2091 antibody, wherein the isolated nucleic acid comprises SEQ ID NO: 196.

[0213] In some embodiments, the disclosure provides an isolated nucleic acid that encodes the heavy chain variable domain of the COV_2100 antibody, wherein the isolated nucleic acid comprises SEQ ID NO: 201 and/or the isolated nucleic acid encodes the light chain variable domain of the of the COV_2100 antibody, wherein the isolated nucleic acid comprises SEQ ID NO:206.

[0214] In some embodiments, the disclosure provides an isolated nucleic acid that encodes the heavy chain variable domain of the COV_2103 antibody, wherein the isolated nucleic acid comprises SEQ ID NO: 211 and/or the isolated nucleic acid encodes the light chain variable domain of the of the COV_2103 antibody, wherein the isolated nucleic acid comprises SEQ ID NO: 216.

[0215] In some embodiments, the disclosure provides an isolated nucleic acid that encodes the heavy chain variable domain of the COV_2108 antibody, wherein the isolated nucleic acid comprises SEQ ID NO: 221 and/or the isolated nucleic acid encodes the light chain variable domain of the of the COV_2108 antibody, wherein the isolated nucleic acid comprises SEQ ID NO: 226.

[0216] In some embodiments, the disclosure provides an isolated nucleic acid that encodes the heavy chain variable domain of the COV_2123 antibody, wherein the isolated nucleic acid comprises SEQ ID NO: 231 and/or the isolated nucleic acid encodes the light chain variable domain of the of the COV_2123 antibody, wherein the isolated nucleic acid comprises SEQ ID NO: 236.

[0217] In some embodiments, the disclosure provides an isolated nucleic acid that encodes the heavy chain variable domain of the COV_2125 antibody, wherein the isolated nucleic acid comprises SEQ ID NO: 241 and/or the isolated nucleic acid encodes the light chain variable domain of the of the COV_2125 antibody, wherein the isolated nucleic acid comprises SEQ ID NO: 246.

[0218] In some embodiments, the disclosure provides an isolated nucleic acid that encodes the heavy chain variable domain of the COV_2134 antibody, wherein the isolated nucleic acid comprises SEQ ID NO: 251 and/or the isolated nucleic acid encodes the light chain variable domain of the of the COV_2134 antibody, wherein the isolated nucleic acid comprises SEQ ID NO: 256.

[0219] In some embodiments, the disclosure provides an isolated nucleic acid that encodes the heavy chain variable domain of the COV_2151 antibody, wherein the isolated nucleic acid comprises SEQ ID NO: 261 and/or the isolated nucleic acid encodes the light chain variable domain of the of the COV_2151antibody, wherein the isolated nucleic acid comprises SEQ ID NO: 266.

[0220] In some embodiments, the disclosure provides an isolated nucleic acid that encodes the heavy chain variable domain of the COV_2165 antibody, wherein the isolated nucleic acid comprises SEQ ID NO: 271 and/or the isolated nucleic acid encodes the light chain variable domain of the of the COV_2165 antibody, wherein the isolated nucleic acid comprises SEQ ID NO: 276.

[0221] In some embodiments, the disclosure provides an isolated nucleic acid that encodes the heavy chain variable domain of the COV_2172 antibody, wherein the isolated nucleic acid comprises SEQ ID NO: 441 and/or the isolated nucleic acid encodes the light chain variable domain of the of the COV_2172 antibody, wherein the isolated nucleic acid comprises SEQ ID NO: 446.

[0222] In some embodiments, the disclosure provides an isolated nucleic acid that encodes the heavy chain variable domain of the COV_2173 antibody, wherein the isolated nucleic acid comprises SEQ ID NO: 281 and/or the isolated nucleic acid encodes the light chain variable domain of the of the COV_2173 antibody, wherein the isolated nucleic acid comprises SEQ ID NO: 286.

[0223] In some embodiments, the disclosure provides an isolated nucleic acid that encodes the heavy chain variable domain of the COV_2193 antibody, wherein the isolated nucleic acid comprises SEQ ID NO: 291 and/or the isolated nucleic acid encodes the light chain variable domain of the of the COV_2193 antibody, wherein the isolated nucleic acid comprises SEQ ID NO: 296.

[0224] In some embodiments, the disclosure provides an isolated nucleic acid that encodes the heavy chain variable domain of the COV_2196 antibody, wherein the isolated nucleic acid comprises SEQ ID NO: 301 and/or the isolated nucleic acid encodes the light chain variable domain of the of the COV_2196 antibody, wherein the isolated nucleic acid comprises SEQ ID NO: 306.

[0225] In some embodiments, the disclosure provides an isolated nucleic acid that encodes the heavy chain variable domain of the COV_3000 antibody, wherein the isolated nucleic acid comprises SEQ ID NO: 311 and/or the isolated nucleic acid encodes the light chain variable domain of the of the COV_3000 antibody, wherein the isolated nucleic acid comprises SEQ ID NO: 316.

[0226] In some embodiments, the disclosure provides an isolated nucleic acid that encodes the heavy chain variable domain of the COV_3005 antibody, wherein the isolated nucleic acid comprises SEQ ID NO: 321 and/or the isolated nucleic acid encodes the light chain variable domain of the of the COV_3005 antibody, wherein the isolated nucleic acid comprises SEQ ID NO: 326.

[0227] In some embodiments, the disclosure provides an isolated nucleic acid that encodes the heavy chain variable domain of the COV_3013 antibody, wherein the isolated nucleic acid comprises SEQ ID NO: 331 and/or the isolated nucleic acid encodes the light chain variable domain of the of the COV_3013 antibody, wherein the isolated nucleic acid comprises SEQ ID NO: 336.

[0228] In some embodiments, the disclosure provides an isolated nucleic acid that encodes the heavy chain variable domain of the COV_3019 antibody, wherein the isolated nucleic acid comprises SEQ ID NO: 341 and/or the isolated nucleic acid encodes the light chain variable domain of the of the COV_3019 antibody, wherein the isolated nucleic acid comprises SEQ ID NO: 346.

[0229] In some embodiments, the disclosure provides an isolated nucleic acid that encodes the heavy chain variable domain of the COV_3028 antibody, wherein the isolated nucleic acid comprises SEQ ID NO: 351 and/or the isolated nucleic acid encodes the light chain variable domain of the of the COV_3028 antibody, wherein the isolated nucleic acid comprises SEQ ID NO: 356.

[0230] In some embodiments, the disclosure provides an isolated nucleic acid that encodes the heavy chain variable domain of the COV_3031 antibody, wherein the isolated nucleic acid comprises SEQ ID NO: 361 and/or the isolated nucleic acid encodes the light chain variable domain of the of the COV_3031 antibody, wherein the isolated nucleic acid comprises SEQ ID NO: 366.

[0231] In some embodiments, the disclosure provides an isolated nucleic acid that encodes the heavy chain variable domain of the COV_3033 antibody, wherein the isolated nucleic acid comprises SEQ ID NO: 371 and/or the isolated nucleic acid encodes the light chain variable domain of the of the COV_3033 antibody, wherein the isolated nucleic acid comprises SEQ ID NO: 376.

[0232] In some embodiments, the disclosure provides an isolated nucleic acid that encodes the heavy chain variable domain of the COV_3037 antibody, wherein the isolated nucleic acid comprises SEQ ID NO: 381 and/or the isolated nucleic acid encodes the light chain variable domain of the of the COV_3037 antibody, wherein the isolated nucleic acid comprises SEQ ID NO: 386.

[0233] In some embodiments, the disclosure provides an isolated nucleic acid that encodes the heavy chain variable domain of the COV_3040 antibody, wherein the isolated nucleic acid comprises SEQ ID NO: 391 and/or the isolated nucleic acid encodes the light chain variable domain of the of the COV_3040 antibody, wherein the isolated nucleic acid comprises SEQ ID NO: 396.

[0234] In some embodiments, the disclosure provides an isolated nucleic acid that encodes the heavy chain variable domain of the COV_3043 antibody, wherein the isolated nucleic acid comprises SEQ ID NO: 400 and/or the isolated nucleic acid encodes the light chain variable domain of the of the COV_3043 antibody, wherein the isolated nucleic acid comprises SEQ ID NO: 406.

[0235] In some embodiments, the disclosure provides an isolated nucleic acid that encodes the heavy chain variable domain of the COV_3053 antibody, wherein the isolated nucleic acid comprises SEQ ID NO: 411 and/or the isolated nucleic acid encodes the light chain variable domain of the of the COV_3053 antibody, wherein the isolated nucleic acid comprises SEQ ID NO: 416.

[0236] In some embodiments, the disclosure provides an isolated nucleic acid that encodes the heavy chain variable domain of the COV_3088 antibody, wherein the isolated nucleic acid comprises SEQ ID NO: 421 and/or the isolated nucleic acid encodes the light chain variable domain of the of the COV_3088 antibody, wherein the isolated nucleic acid comprises SEQ ID NO: 426.

[0237] In some embodiments, the disclosure provides an isolated nucleic acid that encodes the heavy chain variable domain of the COV_1012 antibody, wherein the isolated nucleic acid comprises SEQ ID NO: 451 and/or the isolated nucleic acid encodes the light chain variable domain of the of the COV_1012 antibody, wherein the isolated nucleic acid comprises SEQ ID NO: 456.

[0238] In some embodiments, the disclosure provides an isolated nucleic acid that encodes the heavy chain variable domain of the COV_1025 antibody, wherein the isolated nucleic acid comprises SEQ ID NO: 461 and/or the isolated nucleic acid encodes the light chain variable domain of the of the COV_1025 antibody, wherein the isolated nucleic acid comprises SEQ ID NO: 466.

[0239] In some embodiments, the disclosure provides an isolated nucleic acid that encodes the heavy chain variable domain of the COV_1032 antibody, wherein the isolated nucleic acid comprises SEQ ID NO: 471 and/or the isolated nucleic acid encodes the light chain variable domain of the of the COV_1032 antibody, wherein the isolated nucleic acid comprises SEQ ID NO: 476.

[0240] In some embodiments, the disclosure provides an isolated nucleic acid that encodes the heavy chain variable domain of the COV_1050 antibody, wherein the isolated nucleic acid comprises SEQ ID NO: 481 and/or the isolated nucleic acid encodes the light chain variable domain of the of the COV_1050 antibody, wherein the isolated nucleic acid comprises SEQ ID NO: 486.

[0241] In some embodiments, the disclosure provides an isolated nucleic acid that encodes the heavy chain variable domain of the COV_1056 antibody, wherein the isolated nucleic acid comprises SEQ ID NO: 491 and/or the isolated nucleic acid encodes the light chain variable domain of the of the COV_1056 antibody, wherein the isolated nucleic acid comprises SEQ ID NO: 496.

[0242] In some embodiments, the disclosure provides an isolated nucleic acid that encodes the heavy chain variable domain of the COV_1060 antibody, wherein the isolated nucleic acid comprises SEQ ID NO: 501 and/or the isolated nucleic acid encodes the light chain variable domain of the of the COV_1060 antibody, wherein the isolated nucleic acid comprises SEQ ID NO: 506.

[0243] In some embodiments, the disclosure provides an isolated nucleic acid that encodes the heavy chain variable domain of the COV_1063 antibody, wherein the isolated nucleic acid comprises SEQ ID NO: 511 and/or the isolated nucleic acid encodes the light chain variable domain of the of the COV_1063 antibody, wherein the isolated nucleic acid comprises SEQ ID NO: 516.

[0244] In some embodiments, the disclosure provides an isolated nucleic acid that encodes the heavy chain variable domain of the COV_1071 antibody, wherein the isolated nucleic acid comprises SEQ ID NO: 521 and/or the isolated nucleic acid encodes the light chain variable domain of the of the COV_1071 antibody, wherein the isolated nucleic acid comprises SEQ ID NO: 526.

[0245] In some embodiments, the disclosure provides an isolated nucleic acid that encodes the heavy chain variable domain of the COV_1076 antibody, wherein the isolated nucleic acid comprises SEQ ID NO: 531 and/or the isolated nucleic acid encodes the light chain variable domain of the of the COV_1076 antibody, wherein the isolated nucleic acid comprises SEQ ID NO: 536.

[0246] In some embodiments, the disclosure provides an isolated nucleic acid that encodes the heavy chain variable domain of the COV_1082 antibody, wherein the isolated nucleic acid comprises SEQ ID NO: 541 and/or the isolated nucleic acid encodes the light chain variable domain of the of the COV_1082 antibody, wherein the isolated nucleic acid comprises SEQ ID NO: 546.

[0247] In some embodiments, the disclosure provides an isolated nucleic acid that encodes the heavy chain variable domain of the COV_1085 antibody, wherein the isolated nucleic acid comprises SEQ ID NO: 551 and/or the isolated nucleic acid encodes the light chain variable domain of the of the COV_1085 antibody, wherein the isolated nucleic acid comprises SEQ ID NO: 556.

[0248] In some embodiments, the disclosure provides an isolated nucleic acid that encodes the heavy chain variable domain of the COV_1086 antibody, wherein the isolated nucleic acid comprises SEQ ID NO: 561 and/or the isolated nucleic acid encodes the light chain variable domain of the of the COV_1086 antibody, wherein the isolated nucleic acid comprises SEQ ID NO: 566.

[0249] In some embodiments, the disclosure provides an isolated nucleic acid that encodes the heavy chain variable domain of the COV_1087 antibody, wherein the isolated nucleic acid comprises SEQ ID NO: 571 and/or the isolated nucleic acid encodes the light chain variable domain of the of the COV_1087 antibody, wherein the isolated nucleic acid comprises SEQ ID NO: 576.

[0250] In some embodiments, the disclosure provides an isolated nucleic acid that encodes the heavy chain variable domain of the COV_1097 antibody, wherein the isolated nucleic acid comprises SEQ ID NO: 581 and/or the isolated nucleic acid encodes the light chain variable domain of the of the COV_1097 antibody, wherein the isolated nucleic acid comprises SEQ ID NO: 586.

[0251] In some embodiments, the disclosure provides an isolated nucleic acid that encodes the heavy chain variable domain of the COV_1116 antibody, wherein the isolated nucleic acid comprises SEQ ID NO: 591 and/or the isolated nucleic acid encodes the light chain variable domain of the of the COV_1116 antibody, wherein the isolated nucleic acid comprises SEQ ID NO: 596.

[0252] In some embodiments, the disclosure provides an isolated nucleic acid that encodes the heavy chain variable domain of the COV_1118 antibody, wherein the isolated nucleic acid comprises SEQ ID NO: 601 and/or the isolated nucleic acid encodes the light chain variable domain of the of the COV_1118 antibody, wherein the isolated nucleic acid comprises SEQ ID NO: 606.

[0253] In some embodiments, the disclosure provides an isolated nucleic acid that encodes the heavy chain variable domain of the COV_1122 antibody, wherein the isolated nucleic acid comprises SEQ ID NO: 611 and/or the isolated nucleic acid encodes the light chain variable domain of the of the COV_1122 antibody, wherein the isolated nucleic acid comprises SEQ ID NO: 616.

[0254] In some embodiments, the disclosure provides an isolated nucleic acid that encodes the heavy chain variable domain of the COV_1131 antibody, wherein the isolated nucleic acid comprises SEQ ID NO: 621 and/or the isolated nucleic acid encodes the light chain variable domain of the of the COV_1131 antibody, wherein the isolated nucleic acid comprises SEQ ID NO: 626.

[0255] In some embodiments, the disclosure provides an isolated nucleic acid that encodes the heavy chain variable domain of the COV_1136 antibody, wherein the isolated nucleic acid comprises SEQ ID NO: 631 and/or the isolated nucleic acid encodes the light chain variable domain of the of the COV_1136 antibody, wherein the isolated nucleic acid comprises SEQ ID NO: 636.

[0256] In some embodiments, the disclosure provides an isolated nucleic acid that encodes the heavy chain variable domain of the COV_1144 antibody, wherein the isolated nucleic acid comprises SEQ ID NO: 641 and/or the isolated nucleic acid encodes the light chain variable domain of the of the COV_1144 antibody, wherein the isolated nucleic acid comprises SEQ ID NO: 646.

[0257] In some embodiments, the disclosure provides an isolated nucleic acid that encodes the heavy chain variable domain of the COV_1145 antibody, wherein the isolated nucleic acid comprises SEQ ID NO: 651 and/or the isolated nucleic acid encodes the light chain variable domain of the of the COV_1145 antibody, wherein the isolated nucleic acid comprises SEQ ID NO: 656.

[0258] In some embodiments, the disclosure provides an isolated nucleic acid that encodes the heavy chain variable domain of the COV_1149 antibody, wherein the isolated nucleic acid comprises SEQ ID NO: 661 and/or the isolated nucleic acid encodes the light chain variable domain of the of the COV_1149 antibody, wherein the isolated nucleic acid comprises SEQ ID NO: 666.

[0259] In some embodiments, the disclosure provides an isolated nucleic acid that encodes the heavy chain variable domain of the COV_1151 antibody, wherein the isolated nucleic acid comprises SEQ ID NO: 671 and/or the isolated nucleic acid encodes the light chain variable domain of the of the COV_1151 antibody, wherein the isolated nucleic acid comprises SEQ ID NO: 676.

[0260] In some embodiments, the disclosure provides an isolated nucleic acid that encodes the heavy chain variable domain of the COV_1154 antibody, wherein the isolated nucleic acid comprises SEQ ID NO: 681 and/or the isolated nucleic acid encodes the light chain variable domain of the of the COV_1154 antibody, wherein the isolated nucleic acid comprises SEQ ID NO: 686.

[0261] In some embodiments, the disclosure provides an isolated nucleic acid that encodes the heavy chain variable domain of the COV_1165 antibody, wherein the isolated nucleic acid comprises SEQ ID NO: 691 and/or the isolated nucleic acid encodes the light chain variable domain of the of the COV_1165 antibody, wherein the isolated nucleic acid comprises SEQ ID NO: 696.

[0262] In some embodiments, the disclosure provides an isolated nucleic acid that encodes the heavy chain variable domain of the COV_1166 antibody, wherein the isolated nucleic acid comprises SEQ ID NO: 701 and/or the isolated nucleic acid encodes the light chain variable domain of the of the COV_1166 antibody, wherein the isolated nucleic acid comprises SEQ ID NO: 706.

[0263] In some embodiments, the disclosure provides an isolated nucleic acid that encodes the heavy chain variable domain of the COV_1170 antibody, wherein the isolated nucleic acid comprises SEQ ID NO: 711 and/or the isolated nucleic acid encodes the light chain variable domain of the of the COV_1170 antibody, wherein the isolated nucleic acid comprises SEQ ID NO: 716.

[0264] In some embodiments, the disclosure provides an isolated nucleic acid that encodes the heavy chain variable domain of the COV_1172 antibody, wherein the isolated nucleic acid comprises SEQ ID NO: 721 and/or the isolated nucleic acid encodes the light chain variable domain of the of the COV_1172 antibody, wherein the isolated nucleic acid comprises SEQ ID NO: 726.

[0265] In some embodiments, the disclosure provides an isolated nucleic acid that encodes the heavy chain variable domain of the COV_1177 antibody, wherein the isolated nucleic acid comprises SEQ ID NO: 731 and/or the isolated nucleic acid encodes the light chain variable domain of the of the COV_1177 antibody, wherein the isolated nucleic acid comprises SEQ ID NO: 736.

[0266] In some embodiments, the disclosure provides an isolated nucleic acid that encodes the heavy chain variable domain of the COV_1184 antibody, wherein the isolated nucleic acid comprises SEQ ID NO: 741 and/or the isolated nucleic acid encodes the light chain variable domain of the of the COV_1184 antibody, wherein the isolated nucleic acid comprises SEQ ID NO: 746.

[0267] In some embodiments, the disclosure provides an isolated nucleic acid that encodes the heavy chain variable domain of the COV_1198 antibody, wherein the isolated nucleic acid comprises SEQ ID NO: 751 and/or the isolated nucleic acid encodes the light chain variable domain of the of the COV_1198 antibody, wherein the isolated nucleic acid comprises SEQ ID NO: 756.

[0268] In some embodiments, the disclosure provides an isolated nucleic acid that encodes the heavy chain variable domain of the COV_2032 antibody, wherein the isolated nucleic acid comprises SEQ ID NO: 761 and/or the isolated nucleic acid encodes the light chain variable domain of the of the COV_2032 antibody, wherein the isolated nucleic acid comprises SEQ ID NO: 766.

[0269] In some embodiments, the disclosure provides an isolated nucleic acid that encodes the heavy chain variable domain of the COV_2048 antibody, wherein the isolated nucleic acid comprises SEQ ID NO: 771 and/or the isolated nucleic acid encodes the light chain variable domain of the of the COV_2048 antibody, wherein the isolated nucleic acid comprises SEQ ID NO: 776.

[0270] In some embodiments, the disclosure provides an isolated nucleic acid that encodes the heavy chain variable domain of the COV_2055 antibody, wherein the isolated nucleic acid comprises SEQ ID NO: 781 and/or the isolated nucleic acid encodes the light chain variable domain of the of the COV_2055 antibody, wherein the isolated nucleic acid comprises SEQ ID NO: 786.

[0271] In some embodiments, the disclosure provides an isolated nucleic acid that encodes the heavy chain variable domain of the COV_2056 antibody, wherein the isolated nucleic acid comprises SEQ ID NO: 791 and/or the isolated nucleic acid encodes the light chain variable domain of the of the COV_2056 antibody, wherein the isolated nucleic acid comprises SEQ ID NO: 796.

[0272] In some embodiments, the disclosure provides an isolated nucleic acid that encodes the heavy chain variable domain of the COV_2064 antibody, wherein the isolated nucleic acid comprises SEQ ID NO: 801 and/or the isolated nucleic acid encodes the light chain variable domain of the of the COV_2064 antibody, wherein the isolated nucleic acid comprises SEQ ID NO: 806.

[0273] In some embodiments, the disclosure provides an isolated nucleic acid that encodes the heavy chain variable domain of the COV_2066 antibody, wherein the isolated nucleic acid comprises SEQ ID NO: 811 and/or the isolated nucleic acid encodes the light chain variable domain of the of the COV_2066 antibody, wherein the isolated nucleic acid comprises SEQ ID NO: 816.

[0274] In some embodiments, the disclosure provides an isolated nucleic acid that encodes the heavy chain variable domain of the COV_2077 antibody, wherein the isolated nucleic acid comprises SEQ ID NO: 821 and/or the isolated nucleic acid encodes the light chain variable domain of the of the COV_2077 antibody, wherein the isolated nucleic acid comprises SEQ ID NO: 826.

[0275] In some embodiments, the disclosure provides an isolated nucleic acid that encodes the heavy chain variable domain of the COV_2093 antibody, wherein the isolated nucleic acid comprises SEQ ID NO: 831 and/or the isolated nucleic acid encodes the light chain variable domain of the of the COV_2093 antibody, wherein the isolated nucleic acid comprises SEQ ID NO: 836.

[0276] In some embodiments, the disclosure provides an isolated nucleic acid that encodes the heavy chain variable domain of the COV_2137 antibody, wherein the isolated nucleic acid comprises SEQ ID NO: 841 and/or the isolated nucleic acid encodes the light chain variable domain of the of the COV_2137 antibody, wherein the isolated nucleic acid comprises SEQ ID NO: 846.

[0277] In some embodiments, the disclosure provides an isolated nucleic acid that encodes the heavy chain variable domain of the COV_2143 antibody, wherein the isolated nucleic acid comprises SEQ ID NO: 851 and/or the isolated nucleic acid encodes the light chain variable domain of the of the COV_2143 antibody, wherein the isolated nucleic acid comprises SEQ ID NO: 856.

[0278] In some embodiments, the disclosure provides an isolated nucleic acid that encodes the heavy chain variable domain of the COV_2169 antibody, wherein the isolated nucleic acid comprises SEQ ID NO: 861 and/or the isolated nucleic acid encodes the light chain variable domain of the of the COV_2169 antibody, wherein the isolated nucleic acid comprises SEQ ID NO: 866.

[0279] In some embodiments, the disclosure provides an isolated nucleic acid that encodes the heavy chain variable domain of the COV_2172 antibody, wherein the isolated nucleic acid comprises SEQ ID NO: 871 and/or the isolated nucleic acid encodes the light chain variable domain of the of the COV_2172 antibody, wherein the isolated nucleic acid comprises SEQ ID NO: 876.

[0280] In some embodiments, the disclosure provides an isolated nucleic acid that encodes the heavy chain variable domain of the COV_2174 antibody, wherein the isolated nucleic acid comprises SEQ ID NO: 881 and/or the isolated nucleic acid encodes the light chain variable domain of the of the COV_2174 antibody, wherein the isolated nucleic acid comprises SEQ ID NO: 886.

[0281] In some embodiments, the disclosure provides an isolated nucleic acid that encodes the heavy chain variable domain of the COV_2205 antibody, wherein the isolated nucleic acid comprises SEQ ID NO: 891 and/or the isolated nucleic acid encodes the light chain variable domain of the of the COV_2205 antibody, wherein the isolated nucleic acid comprises SEQ ID NO: 896.

[0282] In some embodiments, the disclosure provides an isolated nucleic acid that encodes the heavy chain variable domain of the COV_2215 antibody, wherein the isolated nucleic acid comprises SEQ ID NO: 901 and/or the isolated nucleic acid encodes the light chain variable domain of the of the COV_2215 antibody, wherein the isolated nucleic acid comprises SEQ ID NO: 906.

[0283] In some embodiments, the disclosure provides an isolated nucleic acid that encodes the heavy chain variable domain of the COV_3049 antibody, wherein the isolated nucleic acid comprises SEQ ID NO: 911 and/or the isolated nucleic acid encodes the light chain variable domain of the of the COV_3049 antibody, wherein the isolated nucleic acid comprises SEQ ID NO: 916.

[0284] In some embodiments, the disclosure provides an isolated nucleic acid that encodes the heavy chain variable domain of the COV_3069 antibody, wherein the isolated nucleic acid comprises SEQ ID NO: 921 and/or the isolated nucleic acid encodes the light chain variable domain of the of the COV_3069 antibody, wherein the isolated nucleic acid comprises SEQ ID NO: 926.

[0285] In some embodiments, the disclosure provides an isolated nucleic acid that encodes the heavy chain variable domain of the COV_3077 antibody, wherein the isolated nucleic acid comprises SEQ ID NO: 931 and/or the isolated nucleic acid encodes the light chain variable domain of the of the COV_3077 antibody, wherein the isolated nucleic acid comprises SEQ ID NO: 936.

[0286] In some embodiments, the disclosure provides an isolated nucleic acid that encodes the heavy chain variable domain of the COV_3079 antibody, wherein the isolated nucleic acid comprises SEQ ID NO: 941 and/or the isolated nucleic acid encodes the light chain variable domain of the of the COV_3079 antibody, wherein the isolated nucleic acid comprises SEQ ID NO: 946.

[0287] In some embodiments, the disclosure provides an isolated nucleic acid that encodes the heavy chain variable domain of the COV_3100 antibody, wherein the isolated nucleic acid comprises SEQ ID NO: 951 and/or the isolated nucleic acid encodes the light chain variable domain of the of the COV_3100 antibody, wherein the isolated nucleic acid comprises SEQ ID NO: 956.

[0288] In some embodiments, the disclosure provides an isolated nucleic acid that encodes the heavy chain variable domain of the COV_3103 antibody, wherein the isolated nucleic acid comprises SEQ ID NO: 961 and/or the isolated nucleic acid encodes the light chain variable domain of the of the COV_3103 antibody, wherein the isolated nucleic acid comprises SEQ ID NO: 966.

[0289] In some embodiments, the disclosure provides an isolated nucleic acid that encodes the heavy chain variable domain of the COV_3129 antibody, wherein the isolated nucleic acid comprises SEQ ID NO: 971 and/or the isolated nucleic acid encodes the light chain variable domain of the of the COV_3129 antibody, wherein the isolated nucleic acid comprises SEQ ID NO: 976.

[0290] In some embodiments, the disclosure provides an isolated nucleic acid that encodes the heavy chain variable domain of the COV_3137 antibody, wherein the isolated nucleic acid comprises SEQ ID NO: 981 and/or the isolated nucleic acid encodes the light chain variable domain of the of the COV_3137 antibody, wherein the isolated nucleic acid comprises SEQ ID NO: 986.

[0291] The present disclosure also provides expression vectors (or plasmids) comprising at least one nucleic acid encoding a CDR, all six CDRs (i.e., H1, H2, H3, L1, L2, and L3), a V_{H} domain, and/or a V_{L} domain of one of the COV_1007, COV_1037, COV_1045, COV_1046, COV_1201, COV_2004, COV_2008, COV_2014, COV_2018, COV_2024, COV_2025, COV_2027, COV_2028, COV_2035, COV_2037, COV_2038, COV_2039, COV_2054, COV_2056, COV_2057, COV_2063, COV_2091, COV_2100, COV_2103, COV_2108, COV_2123, COV_2125, COV_2134, COV_2151, COV_2165, COV_2172, COV_2173, COV_2193, COV_2196, COV_3000, COV_3005, COV_3013, COV_3019, COV_3028, COV_3031, COV_3033, COV_3037, COV_3040, COV_3043, COV_3053, COV_3088, COV_1012, COV_1025, COV_1032, COV_1050, COV_1056, COV_1060, COV_1063, COV_1071, COV_1076, COV_1082, COV_1085, COV_1086, COV_1087, COV_1097, COV_1116, COV_1118, COV_1122, COV_1131, COV_1136, COV_1144, COV_1145, COV_1149, COV_1151, COV_1154, COV_1165, COV_1166, COV_1170, COV_1172, COV_1177, COV_1184, COV_1198, COV_2032, COV_2048, COV_2055, COV_2056, COV_2064, COV_2066, COV_2077, COV_2093, COV_2137, COV_2143, COV_2169, COV_2172, COV_2174, COV_2205, COV_2215, COV_3049, COV_3069, COV_3077, COV_3079, COV_3100, COV_3103, COV_3129, or COV_3137 antibodies, as well as other nucleic acid sequences useful for regulating polypeptide expression. Suitable expression vectors can be chosen or constructed, so that they contain appropriate regulatory sequences, including promoter sequences, terminator sequences, polyadenylation sequences, enhancer sequences, marker genes and other sequences as appropriate.

[0292] The expression vectors can be introduced into a host cell to produce the desired antibody. Systems for cloning and expression of a polypeptide in a variety of different host cells are well known in the art. For cells suitable for producing antibodies, see Gene Expression Systems, Academic Press, eds. Fernandez et al., 1999. Typically, the instant antibodies are expressed, e.g., in a transgenic animal (see Gene Expression Systems, Academic Press, eds. Fernandez et al., 1999), a Chinese Hamster Ovary Cell, a Human Embryonic Kidney 293T cell or in a cell described in the Examples. Any protein compatible expression system may be used to produce the disclosed antibodies.

[0293] A further aspect of the disclosure provides an isolated host cell comprising a nucleic acid (or expression vector) as disclosed herein. A still further aspect provides a method comprising introducing such nucleic acid (or expression vector) into a host cell. The introduction may employ any available technique. For eukaryotic cells, suitable techniques may include calcium phosphate transfection, DEAE-Dextran, electroporation, liposome-mediated transfection and transduction using retrovirus or other virus, e.g., vaccinia or, for insect cells, baculovirus. For bacterial cells, suitable techniques may include calcium chloride transformation, electroporation and transfection using bacteriophage. The introduction of the nucleic acid into the cells may be followed by causing or allowing expression from the nucleic acid, e.g., by culturing host cells under conditions for expression of the gene. Following production by expression an antibody may be isolated and/or purified using any suitable technique, then used as appropriate.

[0294] Methods of Making Antibodies

[0295] Methods of making antibodies are described in the Examples. Numerous other methods for antibody preparation are known to those skilled in the art. For example, antibodies can also be produced using recombinant DNA methods. See, e.g., U.S. Pat. No. 4,816,567, EPO 8430268.0; EPO 85102665.8; EPO 85305604.2; PCT/GB 85/00392; EPO 85115311.4; PCT/US86/002269; and Current Trends in Monoclonal Antibody Development (Steven Shire et al., Eds. Springer, 2010), the disclosures of which are incorporated herein by reference in their entirety. Given the disclosure in this application of specific nucleic acid sequences and the V_{H} and V_{L} (or CDR) amino acid sequences encoded thereby, it is possible, using recombinant DNA techniques, to insert a nucleic acid of interest into an expression vector or otherwise express the nucleic acid of interest in a host cell to produce the desired antibody. In addition, as disclosed elsewhere in this application, modified versions of the antibodies described herein can be produced using known techniques, including, for example, random mutagenesis, error-prone PCR, and direct mutagenesis.

[0296] Monoclonal antibodies may also be produced by preparing immortalized cell lines capable of producing antibodies having desired specificity, for example against an antigen expressing a desired epitope, such as an S1 subunit, NTD, RBD or S2 subunit as disclosed in this application. Such immortalized cell lines may be produced in a variety of ways. Conveniently, a small non-human animal, such as a mouse, is hyperimmunized with the desired immunogen. The vertebrate is then sacrificed, usually several days after the final immunization, the spleen cells removed, and the spleen cells immortalized. The most common technique is fusion with a myeloma cell fusion partner, as first described by Kohler and Milstein (1975) Nature 256:495-497. Other techniques, including EBV transformation, transformation with bare DNA, e.g., oncogenes, retroviruses, etc., or any other method which provides for stable maintenance of the cell line and production of monoclonal antibodies. Specific techniques for preparing monoclonal antibodies are described in Antibodies: A Laboratory Manual, Harlow and Lane, eds., Cold Spring Harbor Laboratory, 1988, the full disclosure of which is incorporated herein by reference.

[0297] In one embodiment, the non-human animal includes at least a part of a human immunoglobulin gene. For example, it is possible to engineer transgenic mouse strains that express human heavy and light chain genes, but are incapable of expressing the endogenous mouse immunoglobulin heavy and light chain genes. Using the hybridoma technology, antigen-specific monoclonal antibodies derived from the genes with the desired specificity may be produced and selected. See, e.g., XENOMOUSE™, Green et al. (1994) Nature Genetics 7:13-21, US 2003-0070185, U.S. Pat. No. 5,225,539, WO 96/34096, published Oct. 31, 1996, and PCT Application No. PCT/US96/05928, filed Apr. 29, 1996, the disclosures of which are incorporated herein by reference in their entirety.

[0298] Immortalized cell lines can be screened using standard methods, such as enzyme-linked immunosorbent assay (ELISA) or surface plasmon resonance analysis, to identify one or more hybridomas that produce an antibody that specifically binds with a specified antigen and/or epitope. Any form of the specified antigen may be used as the immunogen, e.g., recombinant antigen, naturally occurring forms, any variants or fragments thereof, as well as antigenic peptide thereof.

[0299] Another exemplary method of making antibodies includes screening protein expression libraries, e.g., phage or ribosome display libraries. Phage display technology mimics the mammalian immune system by cloning large libraries of antibody genes and selecting for binding to a desired target, such as the coronavirus epitopes disclosed in this application. Phage display is described, for example, in Ladner et al., U.S. Pat. No. 5,223,409; Smith (1985) Science 228:1315-1317; Clackson et al. (1991)Nature, 352: 624-628; Marks et al. (1991) J. Mol. Biol., 222: 581-597WO 92/18619; WO 91/17271; WO 92/20791; WO 92/15679; WO 93/01288; WO 92/01047; WO 92/09690; and WO 90/02809, the disclosures of which are incorporated herein by reference in their entirety.

[0300] Methods of Use

[0301] The antibodies described in this application that bind to a coronavirus can be used in a variety of research and medical applications. In one aspect, the disclosure provides a method of treating or preventing a coronavirus infection in a subject, comprising administering to the subject one or more of the antibodies described herein in an amount effective to treat or prevent the coronavirus infection, such as SARS—Co-V2. Subjects that can be treated with the antibodies disclosed in this application include humans and non-human mammals, including, but not limited to, non-human primates, dogs, cats, horses, cows, sheep, pigs, goats, minks, mice, rats, hamsters, and guinea pigs.

[0302] In one aspect, one or more of the antibodies described herein is used in a method of treating COVID-19. If the disease is COVID-19, the disease can be asymptomatic, mild, moderate, severe, or critical. An asymptomatic form of COVID-19 does not show any symptoms in the subject. A mild form of COVID-19 may show mild form of one or more of: tiredness, fever, cough, breathlessness after moderate exercise, sore throat, muscle ache, headache, and diarrhea. Mild form of COVID-19 may not require management of symptoms. A moderate form of COVID-19 may show moderate form of one or more of: tiredness, fever, cough, breathlessness after slight activity, sore throat, muscle ache, headache, and diarrhea. Moderate form of COVID-19 may require managing the symptoms. A severe form of COVID-19 may show of one or more of: severe tiredness, high fever, cough, breathlessness even at rest, painful breathing, loss of appetite, loss of thirst, sore throat, muscle ache, headache, diarrhea, and confusion. Severe form of COVID-19 would typically require significant intervention for managing symptoms, such as: pneumonia, hypoxemic respiratory failure, acute respiratory distress syndrome (ARDS), sepsis, septic shock, cardiomyopathy, arrhythmia, acute kidney injury, and complications from prolonged hospitalization including secondary bacterial infections, thromboembolism, gastrointestinal bleeding, and critical illness polyneuropathy/myopathy.

[0303] In another aspect, a cocktail of one or more of the antibodies described herein is used in a method of treating or preventing a coronavirus infection or disease, such as COVID-19. For example, the cocktail can include at least one first mAb or antigen-binding fragments thereof, as disclosed herein, that binds to a receptor-binding domain of the S1 subunit and at least one second mAb or antigen-binding fragments thereof, as disclosed herein, that binds to the N-terminal domain of the S1 subunit. For example, the first recombinant monoclonal antibody, or antigen-binding fragment thereof, is one of COV_2123, COV_2125, or COV_2173, or an antigen-binding fragment thereof, and the second recombinant monoclonal antibody is one of COV_2004, COV_2025, or COV_2039, or an antigen-binding fragment thereof.

[0304] The cocktail can also include at least one first mAb or antigen-binding fragments thereof, as disclosed herein, that binds to a receptor-binding domain of the S1 subunit and at least one second mAb or antigen-binding fragments thereof, as disclosed herein, that binds to the S2 subunit. The cocktail can also include at least one first mAb or antigen-binding fragments thereof, as disclosed herein, that binds to the N-terminal domain of the S1 subunit and at least one second mAb or antigen-binding fragments thereof, as disclosed herein, that binds to the S2 subunit. Or the cocktail can include at least one first mAb or antigen-binding fragments thereof, as disclosed herein, that binds to a receptor-binding domain of the S1 subunit and at least one second mAb or antigen-binding fragments thereof, as disclosed herein, that binds to the N-terminal domain of the S1 subunit, and at least one third mAb or antigen-binding fragments thereof, as disclosed herein, that binds to the S2 subunit.

[0305] Alternatively, the cocktail can include a first at least one first mAb or antigen-binding fragments thereof, as disclosed herein, that binds to a receptor-binding domain of the S1 subunit and at least one second mAb or antigen-binding fragments thereof, as disclosed herein, that binds to a receptor-binding domain of the S1 subunit, wherein the first and second mAb are different mAbs. Or the cocktail can include a first at least one first mAb or antigen-binding fragments thereof, as disclosed herein, that binds to a receptor-binding domain of the N-terminal domain of the S1 subunit and at least one second mAb or antigen-binding fragments thereof, as disclosed herein, that binds to the N-terminal domain of the S1 subunit, wherein the first and second mAb are different mAbs. Or the cocktail can include a first at least one first mAb or antigen-binding fragments thereof, as disclosed herein, that binds to a receptor-binding domain of the S2 subunit and at least one second mAb or antigen-binding fragments thereof, as disclosed herein, that binds to the S2 subunit, wherein the first and second mAb are different mAbs.

[0306] In some embodiments, one or more of the instant antibodies can be administered prophylactically before infection or in order to reduce or prevent transmission, or before any clinical indication of illness, disease or infection. In some embodiments, the one or more antibodies can be administered in a time period days before infection or before possible or presumed exposure or risk of exposure as a prophylactic. For example, one or more of the antibodies of the disclosure may be administered a day prior or before, 2 days before or prior, 3 days prior or before, 4 days prior or before, 5 days prior or before, 6 days prior or before, 7 days prior or before, a week prior or before, more than 7 days prior or before, more than a week prior or before, up to 9 days prior or before, up to 10 days prior or before expected exposure. The present antibodies may be used to provide immediate immunity, for example, to avoid an outbreak in a suitable environment, such as a nursing home, military base or hospital or to prevent transmission prior to travel (e.g., entering a plane, train, bus, etc.) or in other instances where social distancing is impractical. In some embodiments, a single administration, e.g., a single injection, may provide immediate immunity that lasts up to 6 months or longer.

[0307] In addition, one or more of the antibodies disclosed herein can be used to detect a coronavirus as described herein, such as SARS-CoV-2 in a sample. In one embodiment, the method comprises contacting one or more of the antibodies disclosed herein with the sample and analyzing the sample to detect binding of the antibody to the coronavirus in the sample, wherein binding of the antibody to the coronavirus in the sample indicates the presence of a coronavirus in the biological sample. Typically, the coronavirus detected is SARS-CoV-2. More typically, the antibodies used to detect coronavirus in a sample is one or more of COV_3053 and/or COV_3088.

[0308] In one embodiment, the sample comprises a non-biological sample, such as soil, water, or food products such as meat. In other embodiments, the sample comprises a biological sample, such as blood, serum, mucus (e.g., nasal swab), tissue, cells, urine, or stool. Such methods can be used to detect a coronavirus infection in a patient, wherein binding of the antibody to the coronavirus in a sample from the patient indicates the presence of the coronavirus infection in the patient.

[0309] Any appropriate label may be used in the detection methods and compositions described herein. A label is any molecule or composition bound to an antibody, or a secondary molecule that is conjugated thereto, and that is detectable by spectroscopic, photochemical, biochemical, immunochemical, electrical, optical or chemical means. Examples of labels, including enzymes, colloidal gold particles, colored latex particles, have been disclosed (U.S. Pat. Nos. 4,275,149; 4,313,734; 4,373,932; and 4,954,452, each incorporated by reference herein). Additional examples of useful labels include, without limitation, haptens (e.g., biotin, digoxigenin (DIG), dintrophenol (DNP), etc.), radioactive isotopes, co-factors, ligands, chemiluminescent or fluorescent agents, protein-adsorbed silver particles, protein-adsorbed iron particles, protein-adsorbed copper particles, protein-adsorbed selenium particles, protein-adsorbed sulphur particles, protein-adsorbed tellurium particles, protein-adsorbed carbon particles, and protein-coupled dye sacs. The attachment of a compound to a label can be through any means, including covalent bonds, adsorption processes, hydrophobic and/or electrostatic bonds, as in chelates and the like, or combinations of these bonds and interactions and/or may involve a linking group.

[0310] Formulations and Administration

[0311] The disclosure provides compositions comprising an antibody described herein that binds to a coronavirus as also herein described. In certain embodiments, the compositions are suitable for pharmaceutical use and administration to patients. These compositions comprise one or more of the COV_1007, COV_1037, COV_1045, COV_1046, COV_1201, COV_2004, COV_2008, COV_2014, COV_2018, COV_2024, COV_2025, COV_2027, COV_2028, COV_2035, COV_2037, COV_2038, COV_2039, COV_2054, COV_2056, COV_2057, COV_2063, COV_2091, COV_2100, COV_2103, COV_2108, COV_2123, COV_2125, COV_2134, COV_2151, COV_2165, COV_2172, COV_2173, COV_2193, COV_2196, COV_3000, COV_3005, COV_3013, COV_3019, COV_3028, COV_3031, COV_3033, COV_3037, COV_3040, COV_3043, COV_3053, COV_3088, COV_1012, COV_1025, COV_1032, COV_1050, COV_1056, COV_1060, COV_1063, COV_1071, COV_1076, COV_1082, COV_1085, COV_1086, COV_1087, COV_1097, COV_1116, COV_1118, COV_1122, COV_1131, COV_1136, COV_1144, COV_1145, COV_1149, COV_1151, COV_1154, COV_1165, COV_1166, COV_1170, COV_1172, COV_1177, COV_1184, COV_1198, COV_2032, COV_2048, COV_2055, COV_2056, COV_2064, COV_2066, COV_2077, COV_2093, COV_2137, COV_2143, COV_2169, COV_2172, COV_2174, COV_2205, COV_2215, COV_3049, COV_3069, COV_3077, COV_3079, COV_3100, COV_3103, COV_3129, or COV_3137 antibodies and a pharmaceutically acceptable excipient.

[0312] Pharmaceutically acceptable excipients include, but are not limited to a carrier or diluent, such as a gum, a starch (e.g. corn starch, pregeletanized starch), a sugar (e.g. lactose, mannitol, sucrose, dextrose), a cellulosic material (e.g. microcrystalline cellulose), an acrylate (e.g. polymethylacrylate), calcium carbonate, magnesium oxide, talc, or mixtures thereof; a binder (e.g. acacia, cornstarch, gelatin, carbomer, ethyl cellulose, guar gum, hydroxypropyl cellulose, hydroxypropyl methyl cellulose, povidone); a disintegrating agent (e.g. cornstarch, potato starch, alginic acid, silicon dioxide, croscarmelose sodium, crospovidone, guar gum, sodium starch glycolate), a buffer (e.g. Tris-HCl, acetate, phosphate) of various pH and ionic strength; and additive such as albumin or gelatin to prevent absorption to surfaces; a detergent (e.g. Tween 20, Tween 80, Pluronic F68, bile acid salts); a protease inhibitor; a surfactant (e.g. sodium lauryl sulfate); a permeation enhancer; a solubilizing agent (e.g. glycerol, polyethylene glycerol); an anti-oxidants (e.g. ascorbic acid, sodium metabisulfite, butylated hydroxyanisole); a stabilizer (e.g. hydroxypropyl cellulose, hydroxypropylmethyl cellulose); a viscosity increasing agent (e.g. carbomer, colloidal silicon dioxide, ethyl cellulose, guar gum); a sweetener (e.g. aspartame, citric acid); a preservative (e.g. Thimerosal, benzyl alcohol, parabens); a lubricant (e.g. stearic acid, magnesium stearate, polyethylene glycol, sodium lauryl sulfate); a flow-aid (e.g. colloidal silicon dioxide), a plasticizer (e.g. diethyl phthalate, triethyl citrate); an emulsifier (e.g. carbomer, hydroxypropyl cellulose, sodium lauryl sulfate); a polymer coating (e.g. poloxamers or poloxamines); a coating and film forming agent (e.g. ethyl cellulose, acrylates, polymethacrylates); an adjuvant; a pharmaceutically acceptable carrier for liquid formulations, such as an aqueous (water, alcoholic/aqueous solution, emulsion or suspension, including saline and buffered media) or non-aqueous (e.g., propylene glycol, polyethylene glycol, and injectable organic esters such as ethyl oleate) solution, suspension, emulsion or oil; and a parenteral vehicle (for subcutaneous, intravenous, intraarterial, or intramuscular injection), including but not limited to, sodium chloride solution, Ringer's dextrose, dextrose and sodium chloride, lactated Ringer's and fixed oils.

[0313] Intravenous vehicles include fluid and nutrient replenishers, electrolyte replenishers such as those based on Ringer's dextrose, and the like. Examples are sterile liquids such as water and oils, with or without the addition of a surfactant and other pharmaceutically acceptable adjuvants. In general, water, saline, aqueous dextrose and related sugar solutions, and glycols such as propylene glycols or polyethylene glycol are preferred liquid carriers, particularly for injectable solutions. Examples of oils are those of animal, vegetable, or synthetic origin, for example, peanut oil, soybean oil, olive oil, sunflower oil, fish-liver oil, another marine oil, or a lipid from milk or eggs.

[0314] A pharmaceutical composition of the disclosure is formulated to be compatible with its intended route of administration. Methods to accomplish the administration are known to those of ordinary skill in the art. This includes, for example, injections, by parenteral routes such as intravenous, intravascular, intraarterial, subcutaneous, intramuscular, intraperitoneal, intraventricular, intraepidural, or others as well as oral, nasal, ophthalmic, rectal, or topical. Sustained release administration is also specifically contemplated, by such means as depot injections or erodible implants. Localized delivery is particularly contemplated, by such means as delivery via a catheter to one or more arteries, such as the renal artery or a vessel supplying a localized site of interest.

[0315] In some embodiments, the present compositions may be formulated in nasal sprays or inhalation solutions or suspensions using approaches known and acceptable in the art and in the medical field and clinical practice. The Food and Drug Administration (FDA9 provides guideline and guidance with regard to such sprays, solutions and suspensions and spray drug products, including in Guidance for Industry documents available at fda.gov. An exemplary July 2002 Guidance for Industry document entitled Nasal Spray and Inhalation Solution, Suspension and Spray Drug Products-Chemistry, Manufacturing and Controls Documentation includes details regarding formulation components and compositions, specifications therefore, manufacturing, and closed container systems.

[0316] Nasal Sprays are drug products that contain active ingredients dissolved or suspended in a formulation, typically aqueous-based, which can contain other excipients and are intended for use by nasal inhalation. Container closure systems for nasal sprays include the container and all components that are responsible for metering, atomization, and delivery of the formulation to the patient. Nasal spray drug products contain therapeutically active ingredients (drug substances) dissolved or suspended in solutions or mixtures of excipients (e.g., preservatives, viscosity modifiers, emulsifiers, buffering agents) in nonpressurized dispensers that deliver a spray containing a metered dose of the active ingredient. The dose can be metered by the spray pump or could have been premetered during manufacture. A nasal spray unit can be designed for unit dosing or can discharge numerous metered sprays of formulation containing the drug substance. Nasal sprays are applied to the nasal cavity for local and/or systemic effects.

[0317] In some embodiments, the pharmaceutical compositions are aerosolized administration. A nebulizer is a drug delivery device used to administer medication in the form of aerosol into the respiratory tract. Nebulizers can be used for intransal and inhalation delivery of monoclonal antibodies through the mouth and nasal passage and are effective devices for delivery of monoclonal antibodies to the upper and/or lower respiratory tract. Nebulizers use oxygen, compressed air or ultrasonic power to break up medical solutions and suspensions into small aerosol droplets that can be directly inhaled from the mouthpiece of the device. In some embodiments, a metered-dose inhaler (MDI) device is used to deliver the one or more antibodies in a specific amount of medication to the lungs in the form of a short burst of aerosolized medicine that is usually self-administered by the patient via inhalation. Dry powder inhalers, which utilize micronized powder often packaged in single dose quantities in blisters or gel capsules containing the powdered medication, may also be used to deliver the one or more antibodies to the lungs. In one embodiment a subject antibody is administered to a patient by intravenous, intramuscular or subcutaneous injection. The antibody may be administered, for example, by bolus injunction or by slow infusion. The dosage may depend on the type and severity of the infection and/or on the characteristics of the individual, such as general health, age, sex, body weight and tolerance to drugs and should be adjusted, as needed, according to individual need and professional judgment. The dosage may also vary depending upon factors, such as route of administration, target site, or other therapies administered. The skilled artisan will be able to determine appropriate doses depending on these and other factors.

[0318] Toxicity and therapeutic efficacy of the composition can be determined by standard pharmaceutical procedures in cell cultures or experimental animals, e.g., determining the LD₅₀ (the dose lethal to 50% of the population) and the ED₅₀ (the dose therapeutically effective in 50% of the population). The dose ratio between toxic and therapeutic effects is the therapeutic index and it can be expressed as the ratio LD₅₀/ED₅₀. Antibodies that exhibit large therapeutic indices may be less toxic and/or more therapeutically effective.

[0319] Unless otherwise defined, all technical and scientific terms used herein have the same meaning as commonly understood by one of ordinary skill in the art. Although methods and materials similar or equivalent to those described herein can be used in the practice or testing of the present disclosure, suitable methods and materials are described below. All publications, patent applications, patents, and other references mentioned herein are incorporated by reference in their entirety. In case of conflict, the present specification, including definitions, will control. In addition, the materials, methods, and examples are illustrative only and not intended to be limiting.

### Example 1. Materials and Methods

### Example 1A. Human Samples

[0320] We have complied with the ethical regulations regarding these studies. These studies were approved by the Walter Reed Army Institute of Research (WRAIR) Institutional Review Board, and written informed consent was obtained from all participants. The investigators have adhered to the policies for protection of human subjects as prescribed in AR 70-25. Plasma from healthy and SARS-CoV-2 convalescent donors originated from WRAIR RV229 and RV229H studies, respectively. Other sources for convalescent plasma included StemExpress and the National Institute for Allergy and Infectious Diseases (NIAID) through its Biodefense and Emerging Infections research (BEI) repository. All convalescent donors (44% male and 56% female aged between 30-65) experienced a range of mild to severe symptoms, with blood drawn 3-7 weeks following the onset of symptoms. Donor #3, from whom monoclonal antibodies were isolated, was enrolled in the RV229H study after experiencing mild to moderate symptoms. Plasma and peripheral blood mononuclear cells (PBMC) were collected 7 weeks following a SARS-CoV-2 positive PCR test.

### Example 1B. Multiplex Antibody Binding Assay

[0321] A high-throughput bead-based antibody binding assay was performed as previously described^{51,52} with modifications to adapt to coronavirus antigens. A cocktail of 25 coronavirus antigens and 2 control proteins (HIV-1 antigens), obtained commercially (SinoBiological) or internally produced (see below), spanning spike S1 and S2 domains for all 7 human coronaviruses were covalently coupled to uniquely coded magnetic microspheres (Luminex) per manufacturer's protocol. Data was collected on a Bio-Plex®3D Suspension Array system (Bio-Rad) running xPONENT® v.4.2 (Luminex). Signal to Noise (S/N) ratio were calculated by the dividing the MFI for each sample by either Ig-depleted healthy plasma or a negative control antibody (MZ4) according to the type of sample analyzed.

### Example 1C. SARS-CoV-2 Pseudovirus Neutralization Assay

[0322] SARS-CoV-2 pseudovirions (pSV) were produced by co-transfection of HEK293T/17 cells with a pcDNA3.1 encoding SARS-CoV-2 S and an HIV-1 NL4-3 luciferase reporter plasmid (pNL4-3.Luc.R-E-, NIH AIDS Reagent Program). The S expression plasmid sequence was derived from the Wuhan Hu-1 strain (GenBank #NC_045512), which is also identical to the IL1/2020 and WA1/2020 strains. The S expression plasmid sequence was also codon optimized and modified to remove the last 18 amino acids of the cytoplasmic tail to improve S incorporation into the pseudovirions and thereby enhance infectivity. S expression plasmids for current SARS-CoV-2 VOC and VOI were similarly codon optimized, modified and included the following mutations: B.1.1.7 or Alpha, (69-70del, Yl44del, N501Y, A570D, D614G, P681H, T7181, S982A, D1118H), B.1.351 orBeta, (L18F, D80A, D215G, 241-243del, K417N, E484K, N501Y, D614G, A701V, E1195Q), B.1.617.2 or Delta, (T19R, G142D, de1156-157, R158G, L452R, T478K, D614G, P681R, D950N), P.1 or Gamma (L18F, T20N, P26S, D138Y, R190S, K417T, E484K, N501Y, D614G, H655Y,T10271) and B.1.427/429 (S131, W152C, L452R, D614G).

[0323] A D614G variant was also made from the Wuhan Hu-1 construct using the Q5 site-directed mutagenesis kit (NEB). In addition, a codon-optimized S expression plasmid encoding SARS-CoV-1 (Sino 1-11, GenBank #AY485277) was generated that incorporated a 28 amino acid C-terminal deletion to improve infectivity⁵³. Virions pseudotyped with the vesicular stomatitis virus (VSV) G protein were used as control. Infectivity and neutralization titers were determined using ACE2-expressing HEK293 target cells (Integral Molecular) in a semi-automated assay format using robotic liquid handling (Biomek NXp Beckman Coulter, as previously described¹⁸. Neutralization dose-response curves were fitted by nonlinear regression using the LabKey server, and the final titers are reported as the reciprocal of the dilution of plasma necessary to achieve 50% neutralization (ID50, 50% inhibitory dose or IC50, 50% inhibitory concentration) and 80% neutralization (ID80, 80% inhibitory dose or IC80, 80% inhibitory concentration). Assay equivalency was verified by participation in the SARS-CoV-2 Neutralizing Assay Concordance Survey (SNACS) run by the Virology Quality Assurance Program and External Quality Assurance Program Oversite Laboratory (EQAPOL) at the Duke Human Vaccine Institute, sponsored through programs supported by the National Institute of Allergy and Infectious Diseases, Division of AIDS.

### Example 1D. Sorting of SARS-CoV-2-Positive B Cells

[0324] Cryopreserved PBMCs were thawed in warm media containing benzonase, then washed with PBS and stained for viability using the Aqua Live/Dead stain (ThermoFisher). Cells were incubated at 21° C. for 30 min with a cocktail of antibodies including CD3 BV510 (BioLegend), CD4 BV510 (BD Biosciences), CD8 BV510 (BioLegend), CD14 BV510 (BioLegend), CD16 BV510 (BD Biosciences) and CD56 BV510 (BioLegend) as dump channel markers, and CD19 PE Dazzle 594 (BioLegend), CD38 BUV496 (BD Biosciences), CD27 BV605 (BioLegend), CD20 AF700 (BD Biosciences), IgD APC/Cyanine7 (BioLegend), integrin β7 PE/Cyanine7 (BD Biosciences), IgG (BioLegend), CD10 BUV395 (BD Biosciences), CD21 FITC (BioLegend), and IgM BV650 (BioLegend).

[0325] Two sorting strategies were used to maximize the number of probes used to isolate antigen-specific B cells: The first strategy utilized a stabilized SARS-CoV-2 S trimer (HexaPro¹¹) conjugated to streptavidin-APC, and the second strategy utilized a multivalent spike ferritin nanoparticle (SpFN¹⁸) displaying eight S trimers to potentially capture conformation-specific B cell receptors. SpFN was incubated with cells during primary staining, and SpFN⁺ B cell were identified by secondary staining using the MM43 monoclonal antibody (SinoBiological, #40591-MM43) conjugated to AF647 (ThermoFisher). Both strategies included SARS-CoV-2 RBD, S1, S2 (ThermoFisher) SARS-CoV S2P, RBD, and S1 to BUV737 (BD Biosciences); MERS-CoV RBD, SL, and S2 to BV421 (BioLegend); and S1+S2 from 229E, NL63, HKU1, and OC43 to BV785 (BioLegend), which were biotinylated, tetramerized, and conjugated to streptavidin-PE. Since these antigens used the same conjugated streptavidin-PE, B cell binding could not be distinguished between SARS-CoV-2 RBD, S1, and S2 using flow cytometry. Specific B cell binding by flow cytometry was determined to the stabilized trimer using conjugated APC, and SpFN using AF647 conjugated to MM43. CD19⁺ B Cells that were antigen-specific were single-cell sorted into PCR plates containing lysis buffer composed of murine RNAse inhibitor (New England Biolabs), dithiothreitol (DTT), SuperScript III First Strand Buffer (ThermoFisher), Igepal (Sigma), and carrier RNA (Qiagen) at one cell per well using a FACS ARIA (Becton Dickinson) and stored at −80° C. until subsequent reverse transcription. Analysis was performed using FlowJo 10 (BD Bioscience).

### Example 1E. Antibody Sequencing and Production

[0326] RNA from single antigen-specific B cells was reverse-transcribed using random hexamers and the SuperScriptIII kit (ThermoFisher). Antibody V (D) J genes were amplified from the cDNA by nested PCR, using the HotStar Taq DNA Polymerase kit (Qiagen) using a combination of primer sets and methods described previously³⁹. V(D)J gene assignment, somatic hypermutation and CDR3 determinations were performed using IgBlast28. Antibody variable regions were synthesized and cloned (Genscript) into CMVR expression vectors (NIH AIDS reagent program) between a murine Ig leader (GenBank DQ407610) and the constant regions of human IgG1 (GenBank AAA02914), Igκ (GenBank AKL91145) or Ig, (GenBank AAA02915). Antibodies were expressed by co-transfecting plasmids encoding paired heavy and light chains into Expi293F cells (ThermoFisher). Monoclonal antibodies were purified 4 to 5 days post-transfection using AMMAG™ protein A magnetic beads and the AMMAG™ SA purification system (Genscript), according to the manufacturer's recommendations, and buffer exchanged into phosphate-buffered saline (PBS). The purity and stability of monoclonal antibodies was assessed by SDS-PAGE and Coomassie staining in both reducing and non-reducing conditions. Control antibodies were all expressed as human IgG1 and purified from Expi293F cells, as described above.

### Example 1F. Fab Production

[0327] Freshly purified WRAIR IgGs in PBS buffer (pH 7.4) were mixed with Lys C protease (New England Biolabs) at 1:2000 (w:w) ratio. Reaction was allowed to proceed for 2-3 hours in a water bath incubator at 37° C. Digestion was assessed by SDS-PAGE and upon completion, the reaction mixture was passed through protein-A beads (0.5-1 ml beads) three times and the final flow through was assessed by SDS-PAGE for purity.

### Example 1G. Production of Recombinant Proteins

[0328] Recombinant SARS-CoV-2 proteins RBD (318-514), NTD (1-290) and S1 (1-665) were made from a synthesized full-length spike sequence (Genscript) from strain USA/IL1/2020 (GenBank #MN988713) and were cloned with C-terminal AVITAG™ (Avidity) and poly-histidine tags into the CMVR vector under the bovine prolactin leader sequence. The coding sequence for the SARS-CoV-2 (Genbank #MN908947) stabilized trimer (S-2P) was a generous gift from Jason McLellan. The S2P sequence was subcloned into the pCMVR vector with C-terminal AVITAG™ (Avidity) and poly-histidine tags. Four additional stabilizing mutations were added using the Quikchange multisite-directed mutagenesis kit (Agilent) to make the HexaPro variant with improved stability¹¹, referred to as stabilized S trimer throughout the manuscript. SARS-CoV-2 RBD constructs (331-527) were also modified to incorporate a N-terminal hexa-histidine tag were derived from the Wuhan-Hu-1 strain genome sequence (GenBank MN9089473). Subsequent RBD VOC with point mutations were generated using a modified QuikChange site-directed mutagenesis protocol (Agilent). A S-2P construct derived from SARS-CoV-1 was generated as previously described⁵⁴. Spike proteins were expressed and biotinylated as previously described⁵⁵, with mutations for B.1.1.7, B.1.351, P.1, B.1.617.2 and other variants added by QuikChange site-directed mutagenesis. ACE2-Ig, a fusion protein made by connecting the human ACE2 (Q9BYF1) extracellular domain (residues 19-611) to the constant domain of a human IgG1 was expressed and purified as described above for antibodies. All proteins were produced transiently from Expi293F or FreeStyle 293F (stabilized trimer) cells (both ThermoFisher) and purified from cell culture supernatants using Ni-NTA (Qiagen) affinity. The stabilized trimer was further purified by gel filtration on an ENRICH™ SEC 650 colunmn (Bio-Rad) and the presence of trimeric S was verified by negative stain electron microscopy. When needed, proteins were biotinylated using the BirA biotin-protein ligase kit (Avidity).

### Example 1H. Authentic SARS-CoV-2 Plaque Reduction Neutralization Test (PRNT)

[0329] Vero E6 cells (ATCC CRL-1586) maintained in Dulbecco's Modified Eagle Medium (DMEM) medium supplemented with 10% fet al bovine serum (FBS) and 2 mM L-glutamine were seeded in 6-well plates at 1×10⁶ cells per well one day prior to infection. PRNTs were performed in triplicate in a biosafety level 3 facility. Three-fold dilutions were performed for each mAb, beginning at 25 μg/ml. The dilutions were made at 2× concentrations and mixed 1:1 with 100 plaque forming units (pfu) of SARS-CoV-2 virus (isolate 2019-nCoV/Italy-INMI1, BEI NR-52284, which is 100% identical to the Wuhan Hu-1 or IL1/2020 strains). The antibody-virus mixtures were incubated at 37° C. for 1 h. The mixtures were then added to the Vero E6 monolayers, incubated for one hour at 37° C. in a humidified incubator with 5% CO², then overlaid with 0.5% agarose in serum-free minimal essential media (MEM) with 100 U/ml of penicillin-streptomycin, 0.25 μg/ml amphotericin B, and 2 mM L-glutamine. The cells were incubated for 72 hours, then fixed in 10% formaldehyde and stained with 0.5% crystal violet. The half maximal inhibitory concentration (IC50) values were determined as the concentration of antibody that resulted in a 50% reduction in number of plaques, compared to virus only control wells.

### Example 1I. Measurements of Antibody Fc Effector Functions Using Recombinant Proteins

[0330] ADCP. ADCP was measured as previously described⁵⁶ using biotinylated SARS-CoV-2 S stabilized trimer. The phagocytic score was calculated by multiplying the percentage of bead-positive cells by the geometric mean fluorescence intensity (MFI) of the bead-positive cells and dividing by 10⁴.

[0331] ADNP. Biotinylated SARS-CoV-2 stabilized trimer was incubated with yellow-green streptavidin-fluorescent beads (Molecular Probes) for 2 h at 37° C. 10 μl of a 100-fold dilution of beads-protein mixture was incubated with monoclonal antibodies as described above before addition of effector cells (50,000 cells/well). Fresh peripheral blood leukocytes from human were used as effector cells after red blood cell lysis with ACK lysing buffer (ThermoFisher Scientific). After 1 h incubation at 37° C., the cells were washed, surface stained, fixed with 4% formaldehyde solution and fluorescence was evaluated on a LSRII (BD Bioscience). Antibodies used for flow cytometry were anti-human CD3 AF700 (clone UCHT1) and anti-human CD14 APC-Cy7 (clone MϕP9; both BD Biosciences) and anti-human CD66b Pacific Blue (clone G10F5, Biolegend). The phagocytic score was calculated by multiplying the percentage of bead-positive neutrophils (SSC high, CD3-CD14-CD66+) by the geometric MFI of the bead-positive cells and dividing by 10⁴.

### Example 1J. Measurements of Antibody Fc Effector Functions Using Cell Surface-Expressed Spikes

[0332] Opsonization. SARS-CoV-2 S-expressing FREESTYLE™ 293F cells (ThermoFisher) were generated by transfection with linearized plasmid encoding a codon-optimized full-length SARS-CoV-2 S protein matching the amino acid sequence of the IL1/2020 isolate (GenBank #MN988713). Stable transfectants were single-cell sorted and selected to obtain a high-level spike surface expressing clone (293F-Spike-S2A). 293F-Spike-S 2A cells were incubated with monoclonal antibodies diluted 3-fold from 15 to 0.06 μg ml⁻⁴ for 30 min at 37° C. Cells were washed twice and stained with anti-human IgG PE (Southern Biotech). Cells were then fixed with 4% formaldehyde solution and fluorescence was evaluated on a LSRII (BD Bioscience).

[0333] Antibody dependent complement activation (ADCD). An ADCD assay was adapted from Fischinger et al.⁵⁷ Briefly, 293F-Spike-S2A cells were incubated with monoclonal antibodies as described above and washed twice and resuspended in R10 media. Cells were washed with PBS and resuspended in 200 μl of guinea pig complement (Cedarlane), which was prepared at a 1:50 dilution in Gelatin Veronal Buffer with Ca²⁺ and Mg²⁺ (Boston BioProducts). After incubation at 37° C. for 20 min, cells were washed and stained with an anti-guinea pig complement C3-FITC (polyclonal, ThermoFisher Scientific). Cells were fixed with 4% formaldehyde solution and fluorescence was evaluated on a LSRII (BD Bioscience).

### Example 1K. Epitope Binning

[0334] Epitopes of the NTD and RBD mAbs were first mapped by binding competition against each other (NTD) or against a set of control antibodies (RBD) using Biolayer interferometry (BLI) on an OCTET® RED96 instrument (ForteBio), as previously described³⁹. Antibodies were defined as competing when binding signal of the second antibody was reduced to less than 25% of its maximum binding capacity and non-competing when binding was greater than 50%. Intermediate competition was defined by binding levels of 25-50%. Control antibodies RBD-A, RBD-B and RBD-C were CC12.1, CC12.16¹³ and CR3022⁵⁸, respectively. The same approach was used to assess binding competition between NTD and RBD antibodies within the stabilized S trimer. ACE2-Ig was used like an antibody to assess the ability of NTD and RBD antibodies to block ACE2 binding to the S trimer.

### Example 1L. Biolayer Interferometry Binding Assays

[0335] Real-time interactions between purified SARS-CoV-2 proteins and antibodies were monitored on an OCTET® RED96 instrument (ForteBio) as previously described³⁹ using biotinylated SARS-CoV-2 NTD and RBD proteins as described above. After reference subtraction, apparent binding kinetic constants were determined, from at least 4 concentrations of antibody, by fitting the curves to a 1:1 binding model using the Data analysis software 10.0 (ForteBio). To assess binding to a panel of RBD mutants, HIS1K biosensors (ForteBio) were equilibrated in assay buffer (PBS) for 15 s before loading of His-tagged SARS-CoV-2 RBD, VOC RBDs, or SARS-CoV-1 RBD (30 μg ml⁻¹ diluted in PBS) for 100 s. Binding responses were measured at the end of the association step using the Data analysis software 10.0 (ForteBio). hACE2-RBD competition assays were carried out as follows: SARS-CoV-2 RBD (30 μg ml⁻¹ diluted in PBS) was immobilized on HIS1K biosensors (ForteBio) for 220 seconds. Test antibodies were allowed to bind for 200 s, followed by baseline equilibration (30 s), and then incubation with hACE2 protein (30 μg ml⁻¹) for 120 s. Percent inhibition (PI) of RBD binding to hACE2 by antibodies was determined using the equation: PI=[(ACE2 binding following RBD-antibody incubation))/(ACE2 binding)]×100. Antibody concentration was titrated from 100 μg ml⁻¹ by serial two-fold dilutions. All assays were performed at 30° C. with agitation set at 1,000 rpm.

### Example 1M. Epitope Mapping of Antibodies by Alanine Scanning

[0336] Epitope mapping was performed essentially as described previously⁵⁹ using SARS-CoV-2 (strain Wuhan-Hu-1) S protein RBD and NTD shotgun mutagenesis mutation libraries, made using a full-length expression construct for S protein. 184 residues of the RBD (between S residues 335 and 526), and 300 residues of the NTD (between residues 2 and 307) were mutated individually to alanine, and alanine residues to serine. Mutations were confirmed by DNA sequencing, and clones arrayed in 384-well plates, one mutant per well. Binding of mAbs to each mutant clone in the alanine scanning library was determined, in duplicate, by high-throughput flow cytometry. Antibody reactivity against each mutant S protein clone was calculated relative to wild-type S protein reactivity by subtracting the signal from mock-transfected controls and normalizing to the signal from wild-type S-transfected controls. Mutations within clones were identified as relevant to the mAb epitope if they did not support reactivity of the test mAb but supported reactivity of other SARS-CoV-2 antibodies. This counter-screen strategy facilitates the exclusion of S mutants that are locally misfolded or have an expression defect.

### Example 1N. X-Ray Crystallography and Structure Analysis

[0337] WRAIR-2173-RBD (15.0 mg ml⁻¹), WRAIR-2151-RBD (12.0 mg ml⁻¹), WRAIR-2057-RBD (12.0 mg ml⁻¹) and WRAIR-2125-RBD complexes (10.0 mg ml⁻¹) were screened for crystallization conditions using an Art Robbins Gryphon crystallization robot, 0.2 μl drops, and a set of 1200 conditions and observed daily using a Jan Scientific UVEX-PS. Crystals used for data collection grew in the following crystallization conditions: WRAIR-2173-RBD complex: 0.09M NPS (Sodium nitrate, Sodium phosphate dibasic, Ammonium sulfate), 0.1M buffer system 3 (Tris base and BICINE, pH 8.5), 50% precipitant mix 4 (25% v/v MPD; 25% PEG 1000; 25% w/v PEG 3350); WRAIR-2151-RBD complex: 0.1 M Sodium acetate trihydrate pH 4.6, 2.0 M Ammonium sulfate; WRAIR-2057-RBD complex: 8% v/v Tacsimate pH 5.0, 20% w/v Polyethylene glycol 3,350; WRAIR-2125-RBD complex: 0.12 M alcohol mixture (1,6-Hexanediol; 1-Butanol; 1,2-Propanediol; 2-Propanol; 1,4-Butanediol; 1,3-Propanediol), 0.1M buffer system 3 (Tris base and BICINE, pH 8.5), 50% precipitant mix 4 (25% v/v MPD; 25% PEG 1000; 25% w/v PEG 3350) and 0.1 M Manganese(II) chloride tetrahydrate.

[0338] Diffraction data were collected at Advanced Photon Source (APS) beamlines. Diffraction data for WRAIR-2125-RBD and WRAIR-2151-RBD complexes were significantly anisotropic and were corrected using the UCLA Diffraction Anisotropy Server⁶⁰. All the crystal structures described in this study were solved by molecular replacement (MR) using PHASER, and iterative model building, and refinement were performed in COOT and Phenix^{61, 62, 63} Diffraction data quality was assessed with Phenix xtriage using data output from HKL2000⁶⁴ and XDS. All structures were refined using Phenix refine with positional, global isotropic B-factor refinement and defined TLS groups. Manual model building was performed in COOT. Overall, the Ramachandran plot as determined by MOLPROBITY showed 92-95% of all residues in favored regions and 4-6% of all residues in the allowed regions. Electron density for the structures was clearly interpretable except for the heavy chain Fc1 domain of WRAIR-2151. Interactive surfaces were analyzed using PISA (www.ebi.ac.uk/pdbe/pisa/). Structure figures were prepared using PyMOL (DeLano Scientific).

### Example 1O. Negative-stain Electron Microscopy

[0339] Fab fragments and SARS-CoV-2 S-2P were mixed at a 3:1 molar ratio for 30 minutes at room temperature, followed by purification using a Superdex-200 column. Purified proteins (5-10 μg/ml) were deposited on carbon-coated copper grids and stained with 0.75% uranyl formate and imaged using a FEI T20 operating at 200 kV with an Eagle 4K CCD using SerialEM or using a Thermo Scientific Talos L120C operating at 120 kV with Thermo Scientific Ceta detector using EPU. All image processing steps were done using RELION 3.0.8⁶⁵ and cryosparc v3.2.0⁶⁶. Particles were picked either manually or using templates generated from manually picked 2D class averages. CTF estimation was done with CTFFIND 4.1.13 and used for 2D classification. 3D map reconstructions were generated using an initial reference generated from S-2P (PDB code: 6VXX) with a low pass filter of 100 Å to remove distinguishable features and ‘Cl’ symmetry. An intermediate structure model was used to create a mask to further refine the structure. Visual analysis and figure generation were performed using Chimera⁶⁷.

### Example 1P. In Vivo Protection Studies in K18-hACE2 Transgenic Mice

[0340] All research in this study involving animals was conducted in compliance with the Animal Welfare Act, and other federal statutes and regulations relating to animals and experiments involving animals and adhered to the principles stated in the Guide for the Care and Use of Laboratory Animals, NRC Publication, 1996 edition. The research protocol was approved by the Institutional Animal Care and Use Committee of the Trudeau Institute and US Army Medical Research. K18-hACE2 transgenic mice were obtained from Jackson Laboratories (Bar Harbor, ME).

[0341] Mice were housed in the animal facility of the Trudeau Institute and cared for in accordance with local, state, federal, and institutional policies in a National Institutes of Health American Association for Accreditation of Laboratory Animal Care-accredited facility. For the prophylactic protection studies, on day ˜1, groups of 15 male and female K18-hACE2 mice (8-10 weeks of age) were injected intravenously with the purified antibodies at the indicated dose. On study day 0, all mice were inoculated with 1.25 ×10⁴ PFU of SARS-CoV-2 USA-WA1/2020 via intranasal instillation, a challenge dose determined from a previous study¹⁹. In the therapeutic study, mice (8-10 weeks of age) were inoculated with SARS-CoV-2 USA-WA1/2020 24 hours prior to being injected intravenously with the indicated antibody cocktail. All mice were monitored for clinical symptoms and body weight twice daily, every 12 hours, from study day 0 to study day 14. Mice were euthanized if they displayed any signs of pain or distress as indicated by the failure to move after stimulated or inappetence, or if mice have greater than 25% weight loss compared to their study day 0 body weight. From each group, a subset (5) of mice, were sacrificed 2 days after challenge for determination of infectious virus titers in lower respiratory tract (from bronchoalveolar lavage and lung tissue) using a PRNT assay.

### Example 1Q. Evaluation of Escape and Selection of Virus Variants

[0342] For the evaluation of antibody escape ability, and generation of putative antibody escape S variants, a previously described chimeric recombinant VSV derivative (rVSV/SARS-CoV-2/GFP2E1) that encodes a SARS-CoV2 S protein in place of VSV-G, recapitulating the neutralization properties of authentic SARS-CoV-2 was prepared and passaged to generate diversity as previously described⁶⁸.

### Example 1R. Statistical Analysis

[0343] Neutralization is the geometric mean of the IC50 values calculated using 5-parameter logistic regression from at least two-independent experiments performed in triplicates (R package nplr). Non-parametric Spearman correlations were used to assess relationship between neutralization and binding or neutralization and effector function data as well as between neutralization data obtained from the pseudotyped and authentic SARS-CoV-2 neutralization assays. Two-tailed Mann-Whitney t-tests were used to verify the existence of significant differences between NTD and RBD mAbs in several binding and functional assays. In the animal studies, one-way ANOVA with Dunnett's multiple comparisons tests were used to assess significance in weight changes and viral loads across groups compared to the isotype control antibody-treated animals. Survival curves were compared individually to the isotype control antibody using a Mantel-Cox log-rank test. Fold change in binding to mutant proteins was calculated relative to the wild-type WA1/2020 spike or RBD proteins. In absence of binding, a background binding value (0.05 nm in BLI assays) was attributed. Fold change in neutralization to VOC was calculated relative to the IL1/2020 virus. Non-neutralizing mAbs were assigned the IC50 of 25 μg ml⁻¹ antibody, the mAb starting concentration in the assay. All tests, except for the 5 parameter logistic regression performed in R (version 3.6.3) and R studio (1.2.1355), were performed in Prism (version 9, GraphPad Software). Data were graphed using Prism software (version 9, GraphPad Software).

### Example 2. Results

[0344] 2a. Isolation of SARS-CoV-2 Antibodies

[0345] Convalescent plasma of 56 SARS-CoV-2—infected human donors, who had mild to moderate symptoms, were screened for neutralization potency. Among them, donor #3 demonstrated potent neutralization and high antibody binding to NTD, RBD, and the prefusion stabilized S trimer¹¹ (S trimer hereafter) (FIG. 2A). Binding to NTD, RBD, and the S trimer strongly correlated with plasma neutralization of pseudotyped SARS-CoV-2 virions (pSV) (FIG. 8A).

[0346] We used peripheral blood mononuclear cells (PBMCs) from donor #3 (FIG. 2A) in two independent sorting strategies to isolate SARS-CoV-2-specific CD19+B cells with a broad range of specificities. The first sorting strategy was based on high plasma neutralization against strain IL1/2020 and high magnitude binding antibodies to N-terminal domain (NTD) on the S1 subunit, the receptor-binding domain (RBD) in the S1 subunit, and Spike (S)-protein trimer (S-trimer) measured in a multiplex bead-based assay. In the second sort, the S trimer was replaced by a multivalent S ferritin nanoparticle (SpFN) displaying eight S trimers (FIG. 8B), a vaccine candidate currently in a Phase 1 clinical trial (NCT04784767)^{18, 19} SpFN was used to mimic the SARS-CoV-2 virus with the desire to isolate mAbs targeting potential conformational or quaternary epitopes. The two sorting strategies revealed complementary profiles in their ability to bind to antigen-specific B cells using flow cytometry, with a high overall frequency of SpFN and S trimer-specific B cells (FIG. 8C). The majority of potent NTD-directed neutralizing mAbs were isolated from the SpFN sort, whereas RBD neutralizing antibodies were obtained from both sorting approaches (FIG. 8D).

[0347] Antibody heavy and light chain pairs were recovered from both sorting strategies and sequenced from single-cell SARS-CoV-2 positive B cells. The nucleotide and amino acid sequence identifiers for the variable heavy chain of selected antibodies are shown in Table 1. Table 2 provides the sequence identifiers for the variable light chains. The specific germline genes (heavy V, heavy D, heavy J, light V) are also depicted in Tables 1, 2 and FIG. 2A. Percent sequence identities between the portion of each variable region sequence corresponding to germline heavy V and light V genes are also shown.

[0348] Antibodies were produced as human IgG1 in EXPI293™ cells and screened as cell culture supernatants for binding and neutralization. The mAbs were subsequently purified and tested for binding to SARS-CoV-2 subdomains, cross-reactivity to other coronaviruses and for neutralization using a pseudotyped lentivirus (pSV) neutralization assay.

[0349] 2b. Binding and Cross Reactivity of Antibodies Directed Against SARS-CoV-2

[0350] As shown in Table 3, below, the majority of the mAbs bound to the S2 subunit of the SARS-CoV-2 spike protein, which may have been a result of the sorting strategy, followed by RBD and NTD, based on binding antibody assays (FIG. 2B). Eleven (11) of the selected SARS-CoV-2 antibodies bind to the NTD region of SARS-CoV-2 (Table 3). Seventeen (17) of the selected antibodies bind to the RBD region (Table 3). COV_1037 and COV_3053 bind to an epitope spanning both the NTD and RBD regions (Table 3). The remaining antibodies bind to the S2 subunit of the SARS-CoV-2 spike protein (Table 3).

[0351] Binding of the instant anti-SARS-CoV-2 antibodies against other coronaviruses including SARS-CoV01, MERS-CoV, HCoV-HKU1 HCoV-NL63 and HCoV-OC43 was also tested as described above in Example 1G. The cross-binding results are shown in Table 4. In addition to SARS-CoV-2, COV_1037, COV_1045, COV_1046, COV_2063, COV_2018, COV_3000, COV_3005, COV_3013, COV_3019, COV_3028, COV_3031, COV_3033, COV_3037, COV_3040 and COV_3043 bound to all of the coronaviruses tested (Table 4). No cross-binding was evident for COV_3053 and COV-3088 (Table 4).

[0352] 2c. Neutralization and Binding Properties of Anti-NTD and Anti-RBD Antibodies

[0353] Neutralization potency of isolated mAbs segregated by subdomain was assessed from the SARS-CoV-2 (IL1/2020) lentivirus-based pseudotyped-virus (pSV) neutralization assay as discussed above. More potent neutralization activity was observed for RBD- and NTD-directed antibodies in comparison to S1 and S2 directed antibodies (FIG. 2C, IC50=50% inhibitory concentration (μg ml⁻¹)). RBD mAbs demonstrated neutralization potency ranging from subnanomolar to micromolar concentrations, whereas NTD mAbs presented a dichotomous profile being either strongly neutralizing or non-neutralizing (FIG. 2C). RBD mAbs revealed a strong correlation between neutralization potency and binding magnitude to the S trimer (FIG. 2D). In contrast, binding to the S trimer did not correlate with neutralization by NTD-targeting mAbs. All NTD neutralizing mAbs displayed intermediate binding to the S trimer, whereas binding responses observed with non-neutralizing NTD mAbs were either high or absent, revealing three distinct binding profiles (FIG. 2D).

[0354] In view of the greater neutralization potency of NTD- and RBD-directed antibodies, we further characterized these antibodies. FIGS. 10B and 10C depicts neutralization curves of anti-NTD and anti-RBD antibodies against the SARS-CoV-2 (IL/2020 strain), which were obtained in the pSV neutralization assay. Three-fold dilutions of antibodies were incubated with HIV-1 virus-like particles pseudotyped with SARS-CoV-2 D18 spike protein and bearing a luciferase reporter gene. The virus-antibody mixtures were tested for their ability to infect HEK293-ACE2 cells by measuring luciferase signal in cell lysates 48 hours post-infection. Mean IC50 and IC80 (ug/mL) values are shown in Table 3. The IC50 values for the tested antibodies ranged from 0-25 μg/ml with antibodies COV_1201, COV_2004, COV_2008, COV-2025, COV_2035, COV_2037, COV_2039, COV_2125, COV_2123, and COV_2173 demonstrating neutralization in the nanomolar range.

[0355] Dissociation constants (K_{D}) were determined assessed as described above in Example 1D for selected NTD- and RBD-directed antibodies. As shown in Table 3, two (2) of the seven (7) anti-RBD antibodies tested, COV_2057 and COV_2063, exhibited K_{D} values of <1 pM. As shown in Table 3, Eight (8) of the ten (10) anti-NTD antibodies tested exhibited K_{D} values of <1 pM, i.e., COV_2008, COV_2025, COV_2035, COV_2037, COV_2039, COV_2004, COV_2054 and COV_2103.

[0356] Binding cross-reactivity across human alpha and beta coronaviruses demonstrated that isolated NTD mAbs were SARS-CoV-2 specific, whereas a few RBD mAbs cross-reacted with SARS-CoV-1 (FIG. 9B, C, Table 4). Of these, WRAIR-2063 was able to potently neutralize SARS-CoV-1 with an IC50 of 95 ng ml⁻¹ (FIG. 9d).

[0357] 2d. Comparison of Neutralization Using Pseudotyped and Authentic SARS-CoV-2 Virus Neutralization Assays

[0358] We next compared the neutralization potency of specific anti-NTD and anti-RBD mAbs in pseudotyped virus neutralization assays with authentic SARS-CoV-2 virus neutralization assays using strains IL1/2020 and INMI1/2020, respectively, which share an identical S sequence. NTD mAbs displayed potent neutralization in both assays with the notable difference that neutralization curves reached a plateau around 75% neutralization in the pseudotyped assay, while the same NTD mAbs were able to fully neutralize authentic SARS-CoV-2 (FIGS. 2E, 2F). A significant correlation between results obtained from both assays was observed (FIG. 2G). Per the pseudotyped neutralization assay, all NTD mAbs demonstrated IC50 below 100 ng ml⁻¹, with COV-2039 and COV-2025 being the most potent at 6 and 9 ng ml⁻¹, respectively (FIG. 2E, F, FIG. 10B and Table 3). RBD-directed antibodies displayed typical sigmoidal curves in both assays and a much wider range of IC50s spanning over several orders of magnitude (FIG. 2E,2F, FIG. 10B). MAbs COV-2173 and COV-2123 were the most potent with identical IC50 values of 4 ng ml⁻¹, followed by WRAIR-2165 (10 ng ml⁻¹) and WRAIR-2125 (17 ng ml⁻¹). When tested as Fabs, COV NTD mAbs no longer neutralized the pseudotyped virus, suggesting that bivalent binding and/or the presence of the Fc domain in the IgG1 format is important for pSV neutralization (FIG. 10C). Fab versions of COV RBD mAbs such as COV-2173 and COV-2151 retained most of their potency but others, like COV-2123 and COV-2125, showed markedly reduced activity by 2- or 3-order of magnitude, likely reflecting differences in their mechanism of action (FIG. 10C).

[0359] 2e Fc Effector Function

[0360] In addition to neutralization activity, Fc effector functions have also been shown to play a role in protection against SARS-CoV-2 in vivo. Therefore, we investigated the ability of our NTD and RBD mAbs, all expressed as IgG1, to promote Fc effector functions (FIG. 11A). We first observed that COV NTD mAbs, inclusive of non-neutralizing mAbs, were significantly better than COV RBD mAbs at mediating opsonization of cells expressing S at their surface (FIG. 2H), a prerequisite for any Fc-effector activities against virus-infected cells. Among NTD mAbs, binding to cell surface Spike was associated with complement recruitment for the neutralizing mAbs only, indicating that non-neutralizing NTD epitopes may not be compatible with Antibody Dependent Complement Deposition, (ADCD) (FIG. 2I). Only one RBD mAb (COV-2165) was able to recruit complement to the level of NTD mAbs and as such, neutralizing NTD mAbs displayed significantly higher ADCD activity than RBD neutralizing mAbs (FIG. 2I). When looking at phagocytic activities with monocytes (Antibody Dependent Cellular Phagocytosis, ADCP) and neutrophils (Antibody Dependent Neutrophil Phagocytosis, ADNP) using a S-expressing 293F cell line whereas phagocytic activities were determined using the stabilized S trimer, COV NTD and RBD mAbs performed equally well, with higher scores significantly correlating with neutralization activity (FIG. 2J and FIG. 111B). However, neutralizing NTD mAbs were significantly better at mediating ADNP compared to non-neutralizing mAbs (FIG. 11C). Taken together, we identified potent neutralizing antibodies directed to the NTD and RBD domains of the Spike on SARS-CoV-2 that are able to mediate Fc effector functions, with the former also demonstrating a unique and strong ability to promote complement deposition.

### Example 3. Epitope Characterization NTD-Targeting mAbs

[0361] We next used a biolayer interferometry (BLI) competition binding assay as a first step to delineate the antigenic sites targeted by these mAbs (FIG. 3A). WRAIR NTD mAbs fell into three distinct groups; all neutralizing antibodies clustered into one group (NTD A), while non-neutralizing antibodies clustered into two groups (NTD B and C) that differed by their ability to bind the S trimer. While NTD C mAbs bound strongly to the S trimer, NTD B mAbs only interacted with the isolated NTD domain, likely recognizing a cryptic epitope hidden in the ‘closed’ prefusion S trimer (FIG. 3A). Notably, many NTD A neutralizing antibodies used heavy chain IGHV1-24 (FIG. 9A), similar to previous mAbs isolated in several convalescent donors^{8,20,26,27}—such as 4A8²⁶, 1-87⁸ and CM25²⁷. Secondly, to further characterize the epitopes targeted by the NTD neutralizing antibodies, we mapped epitopes using a shotgun mutagenesis platform, which measures loss of binding. Despite variations in their antibody complementarity determining region (CDR) H3 lengths and sequences (FIG. 9A), binding of the V_{H}1-24-derived NTD neutralizing mAbs was affected by mutations in the N3 (Y145, K147) and/or N5 (R246, Y248) loops within the previously characterized NTD antigenic supersite^{7,8}. The epitope of NTD mAb WRAIR-2004 (VH1-2 gene) was more extensive with the inclusion of residues in N1 (Q14, V16), in addition to residues in N3 (Y144, K147) and N5 (R246, Y248, P251 and D253) (FIG. 3b). These results were further confirmed by growing a recombinant VSV, encoding SARS-CoV-2 S, in vitro in the presence of NTD neutralizing antibodies (FIG. 3C). All selected viral variants had substitutions in N3 and/or N5 loops at the same position or in the vicinity of the residues identified by the shotgun mutagenesis approach (FIG. 3C). Overall, we identified 3 non-competing groups of NTD-directed antibodies, with NTD A mAbs demonstrating high affinity and neutralization potency.

### Example 4. Structural Determination of RBD-Targeting Antibodies

[0362] To gain insights into the epitopes targeted by the RBD neutralizing mAbs, we conducted similar binding antibody competitions as described above. Based on their competition with previously described mAbs CC12.1, CC12.16 and CR3022^{13,28} WRAIR RBD neutralizing mAbs segregated into 3 distinct groups: RBD-A, B, and C, respectively (FIG. 4A). The most potent neutralizing mAbs belonged to the RBD-A group, which encompassed previously defined RBD mAb classes 1 and 2 that compete strongly with ACE2²⁹ (FIG. 12A). To understand the structural basis of RBD recognition, crystal structures of representative group A, B and C mAbs in complex with RBD were determined (FIG. 4B-E, FIG. 12B-D). Crystal structures of group A potent neutralizing antibodies WRAIR-2125 and -2173 in complex with SARS-CoV-2 RBD were analyzed to a final resolution of 3.77 Å and 2.2 Å, respectively. Both group A mAbs target the ACE2 binding site with overlapping, but distinct epitopes (FIG. 4B,E,Fand FIG. 12B).

[0363] WRAIR-2173 forms extensive interactions across the entire length of the hACE2 receptor binding region whereas WRAIR-2125 is focused to one side and engages fewer RBD residues (FIG. 4B and FIG. 12B). The WRAIR-2125 epitope buries greater than 890 Å² of surface area with heavy and light chains contributing 65% and 35% of total buried surface area (BSA), respectively and is primarily based on CDR H2-3 and CDR L1 and L3 interactions. This includes antibody hydrophobic CDR H2-3 residues V50, Y58, Y99, P100G and CDR L1-3 residues Y32, Y92 and 193, which stack against a hydrophobic patch of the RBD ACE2 binding site (L455, F456, Y473, F486 and Y489).

[0364] WRAIR-2173 mAb epitope is >900 Å² with heavy and light chains contributing ˜65% and 35% of total BSA, respectively. WRAIR-2173 recognition of SARS-CoV-2 RBD is also based primarily on CDR H2-3 and CDR L1-3 (FIG. 4B and FIG. 12B). The CDR H2 and H3 loops cover about 200 Å² and more than 400 Å² of the RBD interface, respectively. CDR H2 residues K55, N56, T57, and Y58 interact with RBD residues 483-486 while CDR H3 recognition involves extensive hydrophobic contacts using CDR H3 residues P98-Y100J to interact with RBD residues K444, Y449, N450, L452, and Q493-Y495. Both WRAIR-2125 and -2173 form strong interactions with RBD F486 overlapping with RBD-hACE2 contacts (FIG. 4B,F,G). Shotgun mutagenesis-based epitope mapping experiments confirmed the hACE2 binding site as the target for RBD A antibodies and identified F486, N487 and Y489 as relevant residues of the WRAIR-2125 epitope, while WRAIR-2173 binding was only moderately affected by mutations at these sites (FIG. 4F and FIG. 12E). Viral escape experiments also identified F486L and Y489H as escape mutations for WRAIR-2125 and Y449D for WRAIR-2173, each in agreement with the structural and epitope mapping data (FIG. 4F and FIG. 12F). Based on the structural superimposition with representative antibodies from previously defined classes WRAIR-2125 and WRAIR-2173 are grouped into Class-1 type mAbs (FIG. 4G). While WRAIR-2125 shares heavy and light chain germline genes with a previously reported mAb, C002^{14,29}, both mAbs have dissimilar CDR H3 sequences and target different epitopes on the RBD (FIG. 13A).

[0365] Representative group B mAb WRAIR-2057 binds to a unique epitope located on the “side” of the RBD molecule, distal from the ACE2 binding site (FIG. 4C, E, F and FIGS. 12C and 12G). Antibodies that target the RBD-B epitope have been seen in other convalescent donor samples^{13,30}, but to our knowledge, this is the first high-resolution structure reported. The epitope covers BSA of 855 Å² with heavy and light chains contributing 72.5% and 27.5% of total BSA, respectively. WRAIR-2057 recognition of SARS-CoV-2 RBD is primarily based on CDR H1-3 and CDR L1 (FIG. 4C and FIG. 12C. Heavy chain interactions form a total of 6 hydrogen bonds and 3 salt-bridges with the RBD along with a set of CDR H1 and H3 hydrophobic residues involved in major contacts, while light chain contacts are primarily mediated by CDR L1 and L2. WRAIR-2057 shares heavy (IGVH5-51) and light (IGKV1-39) chain germline gene usage with SARS-CoV-2 mAb CV38-142³¹. However, these antibodies have distinct non-overlapping epitopes (FIG. 13A,C).

[0366] Representative group C mAb WRAIR-2151 binds to the previously defined CR3022 epitope on the RBD^{28,32} (FIG. 4D-F, FIG. 12G), burying more than 670 Å² with heavy and light chains contributing 37.5% and 62.5% of the total BSA, respectively. WRAIR-2151 recognition of SARS-CoV-2 RBD is primarily based on CDR H2-3 and CDR L1-3 (FIG. 4D, FIG. 12D. Overall contacts are mediated by both hydrophobic and hydrophilic residues (FIG. 4D, FIG. 13A). In summary, we determined the molecular determinants of four RBD-directed neutralizing antibodies belonging to three different classes each with distinct features that bind to SARS-CoV-2.

### Example 5. Efficacy of NTD- and RBD-Directed Antibodies In Vivo

[0367] We next determined whether WRAIR NTD and RBD mAbs could confer protection in vivo with a series of experiments using the lethal K18-hACE2 transgenic SARS-CoV-2 mouse model^{33,34}. To assess protection provided by prophylaxis, mAbs were infused intravenously 24 hours prior to intranasal challenge with an 80% lethal dose of SARS-CoV-2 (1.25×10⁴ PFU WA1/2020). Using a high dose of 400 μg (20 mg kg⁻¹) of either NTD or RBD neutralizing mAbs provided complete protection (FIG. 5A). In contrast, S2-targeting mAb WRAIR-2024 and NTD non-neutralizing mAb WRAIR-2103 did not prevent infection or death at the same concentration of 20 mg kg⁻¹ (FIG. 5A), suggesting that targeting neutralization epitopes is beneficial for in vivo protection.

[0368] To determine the minimal protective dose for prophylactic protection, we next titrated the passively administered potent neutralizing mAbs WRAIR-2039 (NTD) and WRAIR-2123 (RBD) until protection was lost (FIG. 5B). Remarkably, a 5 μg (0.25 mg kg⁻¹) dose of the NTD mAb WRAIR-2039 used alone was sufficient to suppress viral replication in the lungs, confirming the high potency of NTD-directed mAbs in vivo, whereas the lowest dose where protection was observed was 1 mg kg⁻¹ for RBD mAb WRAIR-2123 (FIG. 5B).

[0369] Since NTD and RBD mAbs displayed a wide range of Fc effector functions in vitro, with NTD neutralizing mAbs unique to their class in demonstrating high ADCD activity (FIG. 2H), we sought to examine whether the in vivo potency observed could be explained by engagement of Fe effector functions. RBD mAb WRAIR-2123 and NTD mAb WRAIR-2039 and were modified to harbor a triple mutation (LALA-PG)³⁵ ablating all Fe effector functions, while maintaining binding to cell surface expressed S and potent neutralization (FIG. 14A,B). When tested in vivo for prophylactic protection following passive transfer, the RBD mAb WRAIR-2123 LALA-PG mutant revealed partial protection at the 20 μg (1 mg kg¹) dose, with over half of the animals surviving infection (FIG. 5C). The requirement of Fc effector functions for in vivo protection was more pronounced for the NTD WRAIR-2039 LALA-PG mAb, where most of the animals succumbed to infection by day 8, with modest suppression of viral load in the lungs (FIG. 5C).

### Example 6. Compatibility of Neutralizing NTD and RBD Antibodies

[0370] Combining mAbs targeting different sites on the surface of the viral Spike could offer advantages by increasing both breadth and potency through additive or synergistic mechanisms that can impact both neutralization and Fc effector functions, and possibly mitigate the risk for viral escape. To assess the compatibility of our potent neutralizing NTD and RBD mAbs, we first performed competition experiments with the stabilized S trimer. As expected, the NTD mAbs competed against each other, but they did not prevent binding of COV RBD mAbs to the stabilized S trimer (FIG. 7A). Similar results were obtained when competing COV group A RBD mAbs, where they competed against each other, but could bind simultaneously with COV neutralizing NTD mAbs (FIG. 7A). Modest inhibition of ACE2 binding was observed with the NTD mAbs, likely through steric hindrance through their light chain and/or Fc domains, as reported for MERS-CoV²⁸. However, group A RBD mAbs all fully blocked ACE2 recognition (FIG. 7A). Negative stain electron microscopy (EM) imaging confirmed that COV-2025 and-2173 were indeed able to engage the S trimer concomitantly, albeit with different stoichiometry (FIG. 6B). Two copies of the NTD-directed mAb COV-2025 were observed for the majority of the complexes whereas all three RBD subdomains of the Spike were occupied by COV-2173 (FIG. 7A, 6B. FIG. 14C-D). To verify that combining NTD and RBD mAbs would not be detrimental to their neutralization activity, we analyzed several combinations of the most potent COV mAbs in the SARS-CoV-2 pseudotyped assay. We found no evidence of interference between the two classes of mAbs as all combinations tested showed additive effects, indicating that NTD/RBD mAb cocktails would offer a potent dual target approach (FIG. 15A), Likewise, additive effects were also observed for Fc effector functions of NTD/RBD nAb combinations, particularly with respect to ADCD and ADNP (FIG. 15A).

[0371] Next, we determined whether WRAIR NTD and RBD mAb combinations could confer protection in vivo with a series of experiments using the lethal K18-hACE2 transgenic SARS-CoV-2 mouse as described above. To assess protection provided by prophylaxis, potently neutralizing NTD and RBD mAbs were administered either singly or as a 1:1 combination at a low dose of 20 μg (1 mg kg⁻¹). K18-hACE2 mice treated with these single or dual mAb combinations did not show any clinical signs of illness over the course post-challenge follow-up, while weight loss was observed from day 5 in control animals that received the isotype control mAb (ZIKV_MZ4³⁹) (FIG. 6c, left). By day 7, animals in the control group succumbed to SARS-CoV-2 infection (FIG. 6C, (CONT.)). High infectious virus titer levels were found in lung homogenates, measured at the peak of viral replication, two days post-infection (FIG. 6c, CONT2.). While all mAb-treated groups exhibited significantly lower viral titers in the lungs compared to the isotype control group, all animals treated with the mAb combinations demonstrated undetectable virus in the lungs, with the exception of 2 mice (FIG. 6c, CONT2.). In contrast, low levels of replicating virus were found in mice that received a single mAb at 1 mg kg⁻¹ (FIG. 6c, CONT2.), supporting a role of enhanced protection by combination mAbs targeting two different sites on the Spike surface.

[0372] To determine the minimal protective dose for prophylactic protection for a combination of WRAIR-2039 (NTD) and WRAIR-2123 (RBD), we next titrated the passively administered potent neutralizing mAbs until protection was lost (FIG. 6D). In a 1:1 combination, WRAIR-2039 (NTD) and WRAIR-2123 (RBD), provided suppression of viral replication in the lungs at a low dose of 5 μg (0.25 mg kg⁻¹), where each mAb used at 2.5 μg dose or 0.125 mg kg⁻¹ (FIG. 6D). In addition to prophylaxis, we assessed whether NTD- and RBD-targeting mAb combinations could provide therapeutic benefit, one day after challenge in the same K-18 mice model. A dose-titration experiment revealed that 50 μg (2.5 mg kg⁻¹) of the NTD mAb WRAIR-2039 in combination with RBD mAb WRAIR-2125 was fully protective, with partial protection (4/10 animals) observed at the 12.5 μg (0.625 mg kg⁻¹) dose (FIG. 6E), demonstrating high potency of mAb combinations in both prophylactic and therapeutic challenge models.

[0373] Targeting 2 different sites on the Spike surface may also prevent the emergence of antibody resistant viral variants. To test this hypothesis, we cultivated rVSV/SARS-CoV2/GFP in the presence of single NTD and RBD mAbs, and subsequently selected for resistant viral populations that replicated to high levels, as expected (FIG. 6F). In contrast, when dual combinations containing NTD and RBD mAbs were used at the same total concentration (10 μg ml¹) as was used for the individual mAbs, no infectious rVSV/SARS-CoV2/GFP was recovered (FIG. 6F). Thus, consistent with previous observations³⁶, S mutations can be readily acquired causing escape from individual antibodies, but mAb combinations that target distinct epitopes present a higher genetic barrier to viral escape. Collectively, NTD and RBD mAb combinations demonstrate complementary antibody functions, enhanced in vivo protection, and provide higher resistance to viral escape.

### Example 7. Neutralization of Variants of SARS-CoV-2 Virus

[0374] The emergence of several viral variants of concern (VOCs) threatens current preventative and therapeutic strategies using SARS-CoV-2 neutralizing mAbs. To evaluate the activity of WRAIR mAbs against VOCs, we first assessed binding against a set of S trimers harboring mutations found in circulating VOC (Alpha, Beta, Delta, and Gamma strains) and two variants of interest (VOI) (B.1.427/429 and B.1.526a/b). NTD mAbs showed up to 8-fold reduced binding to B.1.351 (Beta) and 2- to 3-fold to B.1.427/429, but most retained binding to B.1.1.7 (Alpha), B.1.617.2 (Delta) and P.1 (Gamma) (FIG. 7A). However, even when binding was detected, NTD mAbs exhibited altered binding kinetics to B.1.1.7, B.1.351 and B.1.617.2 S trimers, manifested by slower association (decrease in on-rate) and/or faster dissociation (increase in off-rate) (FIG. 15B). RBD mAbs were tested against the same panel of S variants. For RBD A mAbs, loss of binding was largely driven by the E484K mutation, especially when combined with other RBD residue changes such as K417N/T and N501Y (found in the B.1.351 (Beta) and P.1 (Gamma) variants) (FIG. 7A,CONT., left). Binding to RBD proteins harboring those 3 mutations, both individually and in combinations, confirmed these results (FIG. 7A, CONT., right). Among potent neutralizing mAbs, RBD mAb WRAIR-2125 retained binding to all VOC tested, while RBD mAb WRAIR-2173 binding was ablated by the combined double and triple mutations found in VOCs such as B.1.351 and P.1 (FIG. 7a, CONT., right).

[0375] As expected, binding of RBD mAbs from competition groups B and C were less affected by these mutations as their epitopes lie outside of the ACE2 binding interface (FIG. 3). Neutralizing RBD B mAbWRAIR-2063 bound equally well to all WT and mutant proteins, including SARS-CoV-1 (Sino 1-11) RBD (FIG. 7a, CONT., right). We next performed pSV neutralization assays against a panel of SARS-CoV-2 strains encompassing the original virus and circulating VOC. Several mutations such as 69-70del and Y144del (B.1.1.7), 241-243del (B.1.351) or 156-157del (B.1.617.2) conferred SARS-CoV-2 resistance to NTD-mediated neutralization (FIG. 7B,C). As a result, most WRAIR NTD neutralizing mAbs lost their activity against pseudotyped B.1.1.7 (Alpha), B.1.351 (Beta) and B.1.617.2 (Delta), but, interestingly, retained intact potency against P.1 (Gamma), indicating that the mutations present in the NTD of this variant are not as disruptive (FIG. 7B,C). However, both WRAIR-2035 and-2037 retained modest neutralizing activity against B.1.617.2 (Delta), while the latter also neutralized B.1.351 (Beta). For the WRAIR RBD mAbs, several remained highly potent against the B.1.1.7 Alpha variant, which harbor a single RBD mutation, at position N501Y. Similarly, the mutations L452R and T478K present in the B.1.617.2 (Delta) did not significantly impact the neutralization activity of the most potent RBD mAbs such as WRAIR-2123 and-2125, which both displayed IC50 value of 3-4 ng ml¹ against this currently dominating variant. Other variants such as B.1.351 (Beta) and P.1 (Gamma), which combine mutations K417N/T, E484K and N501Y, escaped pSV neutralization from most RBD A mAbs, including three of the most potent WRAIR mAbs, WRAIR-2123, -2165 and -2173. Remarkably, and in agreement with its ability to bind to S trimers harboring mutations found in VOC, WRAIR-2125 was the only RBD A mAb able to potently neutralize all VOC (FIG. 7B,C). RBD mAbs targeting epitopes outside of the ACE2 binding interface, such as WRAIR-2151, were also able to neutralize all SARS-CoV-2 strains tested, albeit less potently than WRAIR-2125 (FIG. 7B,C). In addition, antibody combinations comprising of WRAIR-2125 and either the NTD mAb WRAIR-2039 or the RBD mAbs WRAIR-2123, -2173 or -2151 demonstrated potent neutralization across all VOC (FIG. 7B,C). Taken together, multiple sets of residue mutations and deletions impact antibody binding and neutralization. However, remarkably, WRAIR-2125, retained potent neutralization activities against all VOC either alone or in combination with NTD or other RBD mAbs.

### Example 8. COV-2125

[0376] COV-2125 shares heavy (IGHV3-30*18) and light (IGKV1-39*01) chain usage with previously reported mAbs P17 and C002 (Yao, H. et al. (2021) Cell Res 31, 25-36; Barnes, C. O. et al. (2020) Nature 588, 682-687). However, COV-2125 binding mode is very different from C002, which relies heavily on E484 while COV-2125 is centered around F486 (FIG. 13). Unlike COV-2125, approved first generation mAbs REGN10933 and LY-CoV555 also rely heavily on residues frequently mutated in VOC (FIG. 7D). COV-2125 has reduced BSA interaction with E484 but also K417 residues, explaining its ability to resist neutralization escape by VOCs (FIG. 7D; FIG. 13). In this regard, the binding mode of COV-2125 shares more resemblance to a class of F486-targeting IGHV1-58/IGKV3-20-derived mAbs belonging to a public clonotype identified in multiple donors (Tortorici, M. A. et al. (2020) Science 370, 950-957; Dong, J. et al. (2021) bioRxiv; Wang, L. et al. (2021) bioRxiv). Similarly to COV-2125, these mAbs are potent neutralizers of SARS-CoV-2 and retained high potency across all VOC (Chen, R. E. et al. (2021) Nature medicine). In order to understand the neutralization coverage of COV-2125-like mAbs against SARS-CoV-2 variants, we compared the epitopes of COV-2125 with one of this IGHV1-58/IGKV3-20 mAb, S2E12 (Tortorici, M. A. et al. (2020) Science 370, 950-957), with COV-2173 and emergency use authorized antibodies, REGN10933 and LY-CoV555 (Wang, L. et al. (2021) bioRxiv; Hansen, J. et al. (2020) Science 369, 1010-1014; Gottlieb, R. L. et al. (2021) JAMA 325, 632-644).

[0377] Structural analysis revealed that REGN10933, tightly contacted with variant residues K417 and E484 burying a total surface area of 77 Å² and 64.81 Å², respectively, and made a weak contact with residue N501. Antibody LY-COV555, formed a very strong contact with residue E484 burying a total interfacial area of 97.3 Å² (FIG. 7D). In contrast, COV-2125 and S2E12 are heavily shifted towards one side of the RBD epitope encircling a minimal ACE2 epitope, thereby weakly contacting residues K417 (BSA 44.0 Å² for 2125 and 30.3 Å² for S2E12) and E484 (BSA 34.7 Å² for 2125 and 39.4 Å² for S2E12), COV-2173 mAb forms a strong contact with residue E484 (BSA 94.7 Å²) and minor contacts with N501 (BSA 3.6 Å²) (FIG. 7d). These structural data highlight the advantages of the COV-2173 and -2125 epitopes that can potentially be exploited for next generation vaccine development and therapeutic use.

[0378] In this study, we isolated potent neutralizing monoclonal antibodies targeting the NTD supersite and RBD on the surface of the viral Spike glycoprotein, adding to the current arsenal of potent neutralizing antibodies described (Barnes, C. O. et al. (2020) Nature). In addition to neutralization, both NTD and RBD-targeting mAbs were capable of mediating Fc effectors functions, with a unique ability of NTD neutralizing mAbs to leverage complement deposition. Since these NTD and RBD mAbs do not compete for binding to the S trimer, several combinations of NTD and RBD mAbs were tested for neutralization and in vivo protection. Cocktails of NTD and RBD mAbs demonstrated additive effects on viral neutralization and Fc effector functions in vitro and yielded potent in vivo prophylactic and therapeutic protection. Prophylactic sterilizing protection was observed at a low dose of 20 μg (1 mg kg⁻¹), and partial protection at a 5 μg (0.25 mg kg⁻¹) dose, while therapeutic protection was provided at 2.5 mg kg⁻¹. Prophylactic in vivo protection by NTD-, but not RBD-targeting mAbs, required an intact IgG Fc domain, underlining the importance of Fc effector functions for NTD-targeting mAbs in mediating protection. Along with ADNP, engagement of complement (ADCD) was associated with survival of Covid-19, and collaboration between Fab and Fc effector functions has been shown to be beneficial for vaccine-elicited protection (Gorman, M. J., et al. (2021) bioRxiv).

[0379] Structural analyses revealed these mAbs targeted several epitopes within the NTD supersite and the RBD. COV NTD mAbs share epitope similarities to other IGHV1-24 mAbs described previously (Chi, X. et al. (2020) Science 369, 650-655), with COV-2039, -2025 and -004 (using IGHV1-2) among the most potent of the class. RBD mAbs COV-2173 and -2123 are most similar to RBD class 1 mAbs targeting the receptor binding motif (RBM). COV-2151 largely overlaps with class 3 S309 and CR3022 epitopes, and as such, displayed broad efficacy against SARS-CoV-2 strains. COV-2057 targets a unique RBD epitope on the opposite side of RBD. These mAbs originated from multiple different B cell lineages, indicating that SARS-CoV-2 infection was able to induce neutralizing antibodies through multiple genetic pathways, including public lineages such as IGVH1-24 and IGVH3-53 for NTD and RBD antibodies, respectively. Consistent with previous studies, the majority of isolated SARS-CoV-2 mAbs were close to germline sequences, in agreement with the observation that germline encoded residues play a significant role in binding of several potent neutralizing antibodies across multiple classes (Yuan, M. et al. (2020) Science 369, 1119-1123).

[0380] As VOC such as B.1.1.7, B.1.351 and P.1, harboring multiple mutations in both N-terminal (NTD) and Receptor Binding (RBD) domains, continue to escape first-generation monoclonal antibody therapeutics (Madhi, S. A. et al. (2021) The New England journal of medicine; Zhou, D. et al. (2021) Cell), there is a need for prophylactic and therapeutic mAbs with broad and potent activity against all circulating SARS-CoV-2 strains. Most studies have largely focused on RBD and NTD antibodies separately, with only a few describing potential advantages of combining the two classes of mAbs as a two- or even three-mAb combinations to provide additional coverage (Suryadevara, N. et al. (2021) Cell; Sun, Y. et al. (2021) Cell Res 31, 597-600). Although COV mAbs retained binding activities against current circulating VOC, SARS-CoV-2 variants B.1.1.7, B.1.351 and B.1.427/429 mostly evaded neutralization by NTD mAbs, and multiple mutations present within the B.1.351 strain affected neutralization by some of the most potent COV RBD mAbs. Remarkably, RBD mAb COV-2125, which targets residue F486 in RBD, demonstrated potent neutralizing activity against all SARS-CoV-2 VOC tested and, in combination with NTD and other RBD mAbs, was able to prevent viral escape. COV-2125 targets a minimal epitope required for ACE2 engagement. Combined, these data demonstrate that NTD/RBD mAb cocktails offer potent protection in vivo and broader coverage across VOC, offering advantages over monoclonal antibodies restricted to targeting only than 1 site of vulnerability on the viral surface.

TABLE 1
Structural Characteristics of the variable heavy chains of the of SARS-CoV-2 Antibodies

| | | | | | Nucleotide | Amino Acid |
|---|---|---|---|---|---|---|
| | | Heavy V | | | Sequence, | Sequence, |
| Antibody | Heavy V | Gene | Heavy D | Heavy J | Variable | Variable |
| Name | Gene | Identity % | Gene | Gene | Heavy Chain | Heavy Chain |
| COV_1007 | IGHV2-26 | 98.66 | IGHD5-12 | IGHJ4 | SEQ ID | SEQ ID |
| | | | | | NO: 1 | NO: 2 |
| COV_1037 | IGHV3-33 | 100 | IGHD2-12 | IGHJ6 | SEQ ID | SEQ ID |
| | | | | | NO: 11 | NO: 12 |
| COV_1045 | IGHV1-46 | 84.75 | IGHD3/OR15-3A; | IGHJ4 | SEQ ID | SEQ ID |
| | | | IGHD3/OR15-3B | | NO: 21 | NO: 22 |
| COV_1046 | IGHV1-46 | 89.15 | IGHD3/OR15-3A; | IGHJ4 | SEQ ID | SEQ ID |
| | | | IGHD3/OR15-3B | | NO: 31 | NO: 32 |
| COV_1201 | IGHV1-2 | 98.99 | IGHD3-10 | IGHJ6 | SEQ ID | SEQ ID |
| | | | | | NO: 41 | NO: 42 |
| COV_2004 | IGHV1-2*06 | 98.31 | IGHD3-10*01 | IGHJ5*02 | SEQ ID | SEQ ID |
| | | | | | NO: 51 | NO: 52 |
| COV_2008 | IGHV1-24*01 | 97.97 | IGHD1-20*01 | IGHJ6*02 | SEQ ID | SEQ ID |
| | | | | | NO: 61 | NO: 62 |
| COV_2014 | IGHV1-24*01 | 99.66 | IGHD3-22*01 | IGHJ4*02 | SEQ ID | SEQ ID |
| | | | | | NO: 71 | NO: 72 |
| COV_2018 | IGHV1-69*01; | 96.92 | IGHD1-26*01 | IGHJ4*02 | SEQ ID | SEQ ID |
| | IGHV1-69D | | | | NO: 81 | NO: 82 |
| COV_2024 | IGHV1-69; | 96.96 | IGHD5-12 | IGHJ4*02 | SEQ ID | SEQ ID |
| | IGHV1-69D | | | | NO: 91 | NO: 92 |
| COV_2025 | IGHV1-24*01 | 95.22 | IGHD2-15*01 | IGHJ5*02 | SEQ ID | SEQ ID |
| | | | | | NO: 101 | NO: 102 |
| COV_2027 | IGHV3-53*01 | 97.59 | IGHD1-26*01 | IGHJ4*02 | SEQ ID | SEQ ID |
| | | | | | NO: 111 | NO: 112 |
| COV_2028 | IGHV4-4*02 | 98.64 | IGHD1-7 | IGHJ4*02 | SEQ ID | SEQ ID |
| | | | | | NO: 121 | NO: 122 |
| COV_2035 | IGHV1-24*01 | 97.28 | IGHD5-18*01 | IGHJ5*02 | SEQ ID | SEQ ID |
| | | | | | NO: 131 | NO: 132 |
| COV_2037 | IGHV1-24*01 | 98.98 | IGHD1-20*01 | IGHJ6*02 | SEQ ID | SEQ ID |
| | | | | | NO: 141 | NO: 142 |
| COV_2039 | IGHV1-24*01 | 97.63 | IGHD4-17*01 | IGHJ4*02 | SEQ ID | SEQ ID |
| | | | | | NO: 151 | NO: 152 |
| COV_2054 | IGHV3-30-3*01 | 95.59 | IGHD3-10*01 | IGHJ4*02 | SEQ ID | SEQ ID |
| | | | | | NO: 161 | NO: 162 |
| COV_2056 | IGHV3-30*18; | 97.62 | IGHD3-22*01 | IGHJ3*02 | SEQ ID | SEQ ID |
| | IGHV3-30-5 | | | | NO: 431 | NO: 432 |
| COV_2057 | IGHV5-51*01 | 97.63 | IGHD3-22*01 | IGHJ4*02 | SEQ ID | SEQ ID |
| | | | | | NO: 171 | NO: 172 |
| COV_2063 | IGHV3-33*01 | 99.32 | IGHD3-10*01 | IGHJ3*02 | SEQ ID | SEQ ID |
| | | | | | NO: 181 | NO: 182 |
| COV_2091 | IGHV3-15*01 | 99.67 | IGHD6-6*01 | IGHJ3*02 | SEQ ID | SEQ ID |
| | | | | | NO: 191 | NO: 192 |
| COV_2100 | IGHV3-30-3*01 | 98.63 | IGHD3-3*01; | IGHJ4*02 | SEQ ID | SEQ ID |
| | | | IGHD5-5 | | NO: 201 | NO: 202 |
| COV_2103 | IGHV3-33*01 | 94.92 | IGHD3-22*01 | IGHJ3*01 | SEQ ID | SEQ ID |
| | | | | | NO: 211 | NO: 212 |
| COV_2108 | IGHV3-30-3*01 | 96.27 | IGHD2-21*02 | IGHJ4*02 | SEQ ID | SEQ ID |
| | | | | | NO: 221 | NO: 222 |
| COV_2123 | IGHV3-30-3*01 | 98.31 | IGHD3-10*01 | IGHJ4*02 | SEQ ID | SEQ ID |
| | | | | | NO: 231 | NO: 232 |
| COV_2125 | IGHV3-30*18; | 98.64 | IGHD3-22*01 | IGHJ1*01 | SEQ ID | SEQ ID |
| | IGHV3-30-5 | | | | NO: 241 | NO: 242 |
| COV_2134 | IGHV3-33*01 | 98.98 | IGHD6-19*01 | IGHJ6*02 | SEQ ID | SEQ ID |
| | | | | | NO: 251 | NO: 252 |
| COV_2151 | IGHV4-39*07 | 96.95 | IGHD3-3*02 | IGHJ4*02 | SEQ ID | SEQ ID |
| | | | | | NO: 261 | NO: 262 |
| COV_2165 | IGHV3-48*04 | 98.98 | IGHD6-25*01 | IGHJ4*02 | SEQ ID | SEQ ID |
| | | | | | NO: 271 | NO: 272 |
| COV_2172 | IGHV3-30*18; | 98.26 | IGHD1-26*01 | IGHJ4*02 | SEQ ID | SEQ ID |
| | IGHV3-30-5 | | | | NO: 441 | NO: 442 |
| COV_2173 | IGHV4-39 | 93.98 | IGHD2-2*01 | IGHJ5*02 | SEQ ID | SEQ ID |
| | | | | | NO: 281 | NO: 282 |
| COV_2193 | IGHV1-24*01 | 95.58 | IGHD2-15*01 | IGHJ4*02 | SEQ ID | SEQ ID |
| | | | | | NO: 291 | NO: 292 |
| COV_2196 | IGHV1-24*01 | 97.96 | IGHD6-25*01 | IGHJ4*02 | SEQ ID | SEQ ID |
| | | | | | NO: 301 | NO: 302 |
| COV_3000 | IGHV3-49 | 94.04 | IGHD3-3 | IGHJ4 | SEQ ID | SEQ ID |
| | | | | | NO: 311 | NO: 312 |
| COV_3005 | IGHV3-23; | 82.77 | IGHD6-6 | IGHJ4 | SEQ ID | SEQ ID |
| | IGHV3-23D | | | | NO: 321 | NO: 322 |
| COV_3013 | IGHV3-49 | 92.72 | IGHD3-3 | IGHJ3 | SEQ ID | SEQ ID |
| | | | | | NO: 331 | NO: 332 |
| COV_3019 | IGHV3-49 | 91.39 | IGHD5/OR15-5A; | IGHJ43 | SEQ ID | SEQ ID |
| | | | IGHD5/OR15-5B | | NO: 341 | NO: 342 |
| COV_3028 | IGHV3-49 | 91.06 | IGHD5/OR15-5A; | IGHJ3 | SEQ ID | SEQ ID |
| | | | IGHD5/OR15-5B | | NO: 351 | NO: 352 |
| COV_3031 | IGHV3-49 | 94.37 | IGHD2-2 | IGHJ3 | SEQ ID | SEQ ID |
| | | | | | NO: 361 | NO: 362 |
| COV_3033 | IGHV3-49 | 84.44 | IGHD2-2 | IGHJ3 | SEQ ID | SEQ ID |
| | | | | | NO: 371 | NO: 372 |
| COV_3037 | IGHV3-49 | 93.71 | IGHD3-3 | IGHJ3 | SEQ ID | SEQ ID |
| | | | | | NO: 381 | NO: 382 |
| COV_3040 | IGHV3-49 | 93.02 | IGHD3-3 | IGHJ3 | SEQ ID | SEQ ID |
| | | | | | NO: 391 | NO: 392 |
| COV_3043 | IGHV3-49 | 93.05 | IGHD2/OR15-2A; | IGHJ3 | SEQ ID | SEQ ID |
| | | | IGHD2/OR15-2B | | NO: 401 | NO: 402 |
| COV_3053 | IGHV3-49 | 89.74 | IGHD3-10 | IGHJ3 | SEQ ID | SEQ ID |
| | | | | | NO: 411 | NO: 412 |
| COV_3088 | IGHV3-13 | 100 | IGHD6-19 | IGHJ4 | SEQ ID | SEQ ID |
| | | | | | NO: 421 | NO: 422 |
| CoV_1012 | IGHV4-4 | 97.95 | IGHD1-26 | IGHJ3 | SEQ ID | SEQ ID |
| | | | | | NO: 451 | NO: 452 |
| CoV_1025 | IGHV3-30-3 | 97.97 | IGHD3-10 | IGHJ6 | SEQ ID | SEQ ID |
| | | | | | NO: 461 | NO: 462 |
| CoV_1032 | IGHV4-59 | 98.97 | IGHD3-10 | IGHJ4 | SEQ ID | SEQ ID |
| | | | | | NO: 471 | NO: 472 |
| CoV_1050 | IGHV3-30-3 | 96.93 | IGHD3-22 | IGHJ1; IGHJ4; | SEQ ID | SEQ ID |
| | | | | IGHJ5 | NO: 481 | NO: 482 |
| CoV_1056 | IGHV3-30; | 92.83 | IGHD2-21 | IGHJ5 | SEQ ID | SEQ ID |
| | IGHV3-30-5; | | | | NO: 491 | NO: 492 |
| | IGHV3-33 | | | | | |
| CoV_1060 | IGHV5-51 | 97.28 | IGHD2-8 | IGHJ6 | SEQ ID | SEQ ID |
| | | | | | NO: 501 | NO: 502 |
| CoV_1063 | IGHV3-7 | 85.76 | IGHD2-2; | IGHJ4; IGHJ5 | SEQ ID | SEQ ID |
| | | | IGHD2/OR15-2A; | | NO: 511 | NO: 512 |
| | | | IGHD2/OR15-2B | | | |
| CoV_1071 | IGHV1-46 | 85.08 | IGHD3/OR15-3A; | IGHJ4 | SEQ ID | SEQ ID |
| | | | IGHD3/OR15-3B | | NO: 521 | NO: 522 |
| CoV_1076 | IGHV3-11 | 92.86 | IGHD7-27 | IGHJ4; IGHJ5 | SEQ ID | SEQ ID |
| | | | | | NO: 531 | NO: 532 |
| CoV_1082 | IGHV3-48 | 87.38 | IGHD3-3; | IGHJ5 | SEQ ID | SEQ ID |
| | | | IGHD3-9 | | NO: 541 | NO: 542 |
| CoV_1085 | IGHV3-33 | 97.3 | IGHD6-19 | IGHJ4 | SEQ ID | SEQ ID |
| | | | | | NO: 551 | NO: 552 |
| CoV_1086 | IGHV3-23; | 91.55 | IGHD6-19 | IGHJ4 | SEQ ID | SEQ ID |
| | IGHV3-23D | | | | NO: 561 | NO: 562 |
| CoV_1087 | IGHV1-46 | 87.8 | IGHD3/OR15-3A; | IGHJ4 | SEQ ID | SEQ ID |
| | | | IGHD3/OR15-3B | | NO: 571 | NO: 572 |
| CoV_1097 | IGHV4-59 | 98.63 | IGHD2-8 | IGHJ6 | SEQ ID | SEQ ID |
| | | | | | NO: 581 | NO: 582 |
| CoV_1116 | IGHV3-21 | 98.31 | IGHD6-6 | IGHJ6 | SEQ ID | SEQ ID |
| | | | | | NO: 591 | NO: 592 |
| CoV_1118 | IGHV3-21 | 97.64 | IGHD3-22 | IGHJ4 | SEQ ID | SEQ ID |
| | | | | | NO: 601 | NO: 602 |
| CoV_1122 | IGHV4-59 | 98.97 | IGHD3-22 | IGHJ6 | SEQ ID | SEQ ID |
| | | | | | NO: 611 | NO: 612 |
| CoV_1131 | IGHV4-59 | 98.29 | IGHD3-10 | IGHJ3 | SEQ ID | SEQ ID |
| | | | | | NO: 621 | NO: 622 |
| CoV_1136 | IGHV3-21 | 96.96 | IGHD3-22 | IGHJ4 | SEQ ID | SEQ ID |
| | | | | | NO: 631 | NO: 632 |
| CoV_1144 | IGHV3-7 | 96.61 | IGHD2-8 | IGHJ4 | SEQ ID | SEQ ID |
| | | | | | NO: 641 | NO: 642 |
| CoV_1145 | IGHV3-33 | 99.32 | IGHD1-26 | IGHJ4 | SEQ ID | SEQ ID |
| | | | | | NO: 651 | NO: 652 |
| CoV_1149 | IGHV3-30; | 100 | IGHD5-18; | IGHJ4; IGHJ5 | SEQ ID | SEQ ID |
| | IGHV3-30-5 | | IGHD5-5 | | NO: 661 | NO: 662 |
| CoV_1151 | IGHV4-34 | 96.59 | IGHD4-17 | IGHJ6 | SEQ ID | SEQ ID |
| | | | | | NO: 671 | NO: 672 |
| CoV_1154 | IGHV3-21 | 96.62 | IGHD3-22 | IGHJ4 | SEQ ID | SEQ ID |
| | | | | | NO: 681 | NO: 682 |
| CoV_1165 | IGHV3-33 | 91.89 | IGHD2/OR15-2A; | IGHJ4 | SEQ ID | SEQ ID |
| | | | IGHD2/OR15-2B | | NO: 691 | NO: 692 |
| CoV_1166 | IGHV3-7 | 97.97 | IGHD1-26 | IGHJ3 | SEQ ID | SEQ ID |
| | | | | | NO: 701 | NO: 702 |
| CoV_1170 | IGHV3-30-3 | 98.98 | IGHD1-14 | IGHJ5 | SEQ ID | SEQ ID |
| | | | | | NO: 711 | NO: 712 |
| CoV_1172 | IGHV4-59 | 97.95 | IGHD2-15 | IGHJ3 | SEQ ID | SEQ ID |
| | | | | | NO: 721 | NO: 722 |
| CoV_1177 | IGHV3-33 | 100 | IGHD6-19 | IGHJ4 | SEQ ID | SEQ ID |
| | | | | | NO: 731 | NO: 732 |
| CoV_1184 | IGHV4-34 | 99.32 | IGHD3-22 | IGHJ5 | SEQ ID | SEQ ID |
| | | | | | NO: 741 | NO: 742 |
| CoV_1198 | IGHV3-64D | 90.66 | IGHD4-11; | IGHJ4 | SEQ ID | SEQ ID |
| | | | IGHD4-4 | | NO: 751 | NO: 752 |
| CoV_2032 | IGHV3-74 | 97.3 | IGHD2-8 | IGHJ4 | SEQ ID | SEQ ID |
| | | | | | NO: 761 | NO: 762 |
| CoV_2048 | IGHV4-39 | 96.66 | IGHD4-17 | IGHJ4 | SEQ ID | SEQ ID |
| | | | | | NO: 771 | NO: 772 |
| CoV_2055 | IGHV3-30*018; | 97.96 | IGHD3-22*01/ | IGHJ4*02 | SEQ ID | SEQ ID |
| | IGHV3-30-5 | | OR15-2A; | | NO: 781 | NO: 782 |
| | | | IGHD2/OR15-2B | | | |
| CoV_2056 | IGHV3-30; | 97.62 | IGHD3-22 | IGHJ3 | SEQ ID | SEQ ID |
| | IGHV3-30-5 | | | | NO: 791 | NO: 792 |
| CoV_2064 | IGHV3-74 | 93.2 | IGHD3-9 | IGHJ6 | SEQ ID | SEQ ID |
| | | | | | NO: 801 | NO: 802 |
| CoV_2066 | IGHV4-38-2 | 86.78 | IGHD6-13; | IGHJ4 | SEQ ID | SEQ ID |
| | | | IGHD6-19; | | NO: 811 | NO: 812 |
| | | | IGHD6-25 | | | |
| CoV_2077 | IGHV4-59 | 99.66 | IGHD1-7 | IGHJ4 | SEQ ID | SEQ ID |
| | | | | | NO: 821 | NO: 822 |
| CoV_2093 | IGHV3-7 | 96.28 | IGHD3-3 | IGHJ6 | SEQ ID | SEQ ID |
| | | | | | NO: 831 | NO: 832 |
| CoV_2137 | IGHV3-21*01 | 97.97 | IGHD1-14*01 | IGHJ2*01 | SEQ ID | SEQ ID |
| | | | | | NO: 841 | NO: 842 |
| CoV_2143 | IGHV3-30; | 96.94 | IGHD3-22 | IGHJ3 | SEQ ID | SEQ ID |
| | IGHV3-30-3 | | | | NO: 851 | NO: 852 |
| CoV_2169 | IGHV3-30-3 | 96.18 | IGHD3-22 | IGHJ3 | SEQ ID | SEQ ID |
| | | | | | NO: 861 | NO: 862 |
| CoV_2172 | IGHV3-30; | 96.26 | IGHD1-26 | IGHJ4 | SEQ ID | SEQ ID |
| | IGHV3-30-5 | | | | NO: 871 | NO: 872 |
| CoV_2174 | IGHV3-11*04 | 99.66 | IGHD2-2*01 | IGHJ6*02 | SEQ ID | SEQ ID |
| | | | | | NO: 881 | NO: 882 |
| CoV_2205 | IGHV3-11 | 96.94 | IGHD3-9 | IGHJ4 | SEQ ID | SEQ ID |
| | | | | | NO: 891 | NO: 892 |
| CoV_2215 | IGHV3-15 | 99 | IGHD3-22 | IGHJ3 | SEQ ID | SEQ ID |
| | | | | | NO: 901 | NO: 902 |
| CoV_3049 | IGHV3-49 | 92.72 | IGHD2-15; | IGHJ3 | SEQ ID | SEQ ID |
| | | | IGHD2-2 | | NO: 911 | NO: 912 |
| CoV_3069 | IGHV3-21 | 95.25 | IGHD3-22 | IGHJ4 | SEQ ID | SEQ ID |
| | | | | | NO: 921 | NO: 922 |
| CoV_3077 | IGHV4-38-2 | 100 | IGHD1-1; | IGHJ3 | SEQ ID | SEQ ID |
| | | | IGHD2-15; | | NO: 931 | NO: 932 |
| | | | IGHD2-2; | | | |
| | | | IGHD2-8; | | | |
| | | | IGHD2/OR15-2A; | | | |
| | | | IGHD2/OR15-2B; | | | |
| | | | IGHD5-24 | | | |
| CoV_3079 | IGHV3-30-3 | 100 | IGHD1-26 | IGHJ6 | SEQ ID | SEQ ID |
| | | | | | NO: 941 | NO: 942 |
| CoV_3100 | IGHV3-49 | 91.39 | IGHD2-2 | IGHJ3 | SEQ ID | SEQ ID |
| | | | | | NO: 951 | NO: 952 |
| CoV_3103 | IGHV3-9 | 86.78 | IGHD3-10 | IGHJ6 | SEQ ID | SEQ ID |
| | | | | | NO: 961 | NO: 962 |
| CoV_3129 | IGHV4-34 | 92.23 | IGHD2-8 | IGHJ4 | SEQ ID | SEQ ID |
| | | | | | NO: 971 | NO: 972 |
| CoV_3137 | IGHV3-33 | 83.88 | IGHD6-19 | IGHJ4 | SEQ ID | SEQ ID |
| | | | | | NO: 981 | NO: 982 |

TABLE 2
Structural Characteristics of the variable
light chain of the of SARS-CoV-2 Antibodies

| | | | | Nucleotide | Amino Acid |
|---|---|---|---|---|---|
| | | Light V | | Sequence, | Sequence, |
| Antibody | Light V | Gene | Light J | Variable | Variable |
| Name | Gene | % Identity | Gene | Light Chain | Light Chain |
| COV_1007 | IGKV1D-12 | 98.23 | IGKJ4 | SEQ ID NO: 6 | SEQ ID NO: 7 |
| COV_1037 | IGKV2-28; | 100 | IGKJ3 | SEQ ID NO: 16 | SEQ ID NO: 17 |
| | IGKV2D-28 | | | | |
| COV_1045 | IGKV2-24 | 95.02 | IGKJ1 | SEQ ID NO: 26 | SEQ ID NO: 27 |
| COV_1046 | IGKV2-24 | 96.68 | IGKJ1 | SEQ ID NO: 36 | SEQ ID NO: 37 |
| COV_1201 | IGLV2-14 | 99.32 | IGLJ1 | SEQ ID NO: 46 | SEQ ID NO: 47 |
| COV_2004 | IGKV1D-16 | 99.3 | IGKJ2 | SEQ ID NO: 56 | SEQ ID NO: 57 |
| COV_2008 | IGKV2-24 | 99.33 | IGKJ2 | SEQ ID NO: 66 | SEQ ID NO: 67 |
| COV_2014 | IGKV1-9 | 98.25 | IGKJ5 | SEQ ID NO: 76 | SEQ ID NO: 77 |
| COV_2018 | IGKV3-11 | 97.21 | IGKJ1 | SEQ ID NO: 86 | SEQ ID NO: 87 |
| COV_2024 | IGKV3-11 | 98.26 | IGKJ1 | SEQ ID NO: 96 | SEQ ID NO: 97 |
| COV_2025 | IGLV2-14 | 97.64 | IGLJ1 | SEQ ID NO: 106 | SEQ ID NO: 107 |
| COV_2027 | IGKV3-20 | 100 | IGKJ2 | SEQ ID NO: 116 | SEQ ID NO: 117 |
| COV_2028 | IGLV2-23 | 97.97 | IGLJ3 | SEQ ID NO: 126 | SEQ ID NO: 127 |
| COV_2035 | IGLV2-8 | 98.97 | IGLJ2; | SEQ ID NO: 136 | SEQ ID NO: 137 |
| | | | IGLJ3 | | |
| COV_2037 | IGKV2-24 | 98.33 | IGKJ2 | SEQ ID NO: 146 | SEQ ID NO: 147 |
| COV_2039 | IGLV1-40 | 98.33 | IGLJ2; | SEQ ID NO: 156 | SEQ ID NO: 157 |
| | | | IGLJ3 | | |
| COV_2054 | IGKV1-5 | 97.51 | IGKJ2 | SEQ ID NO: 166 | SEQ ID NO: 167 |
| COV_2056 | IGKV1-12 | 99.3 | IGKJ4 | SEQ ID NO: 436 | SEQ ID NO: 437 |
| COV_2057 | IGKV1-39; | 98.25 | IGKJ3 | SEQ ID NO: 176 | SEQ ID NO: 177 |
| | IGKV1D-39 | | | | |
| COV_2063 | IGKV2-30 | 99 | IGKJ4 | SEQ ID NO: 186 | SEQ ID NO: 187 |
| COV_2091 | IGKV1-39; | 100 | IGKJ4 | SEQ ID NO: 196 | SEQ ID NO: 197 |
| | IGKV1D-39 | | | | |
| COV_2100 | IGKV1-39; | 96.48 | IGKJ4 | SEQ ID NO: 206 | SEQ ID NO: 207 |
| | IGKV1D-39 | | | | |
| COV_2103 | IGKV1-5 | 97.54 | IGKJ3 | SEQ ID NO: 216 | SEQ ID NO: 217 |
| COV_2108 | IGKV1-39; | 98.26 | IGKJ4 | SEQ ID NO: 226 | SEQ ID NO: 227 |
| | IGKV1D-39 | | | | |
| COV_2123 | IGKV1-33; | 98.95 | IGKJ4 | SEQ ID NO: 236 | SEQ ID NO: 237 |
| | IGKV1D-33 | | | | |
| COV_2125 | IGKV1-39; | 96.5 | IGKJ1 | SEQ ID NO: 246 | SEQ ID NO: 247 |
| | IGKV1D-39 | | | | |
| COV_2134 | IGLV3-1 | 99.65 | IGLJ2; | SEQ ID NO: 256 | SEQ ID NO: 257 |
| | | | IGLJ3 | | |
| COV_2151 | IGLV6-57 | 98.98 | IGLJ3 | SEQ ID NO: 266 | SEQ ID NO: 267 |
| COV_2165 | IGKV3-11 | 98.6 | IGKJ3 | SEQ ID NO: 276 | SEQ ID NO: 277 |
| COV_2172 | IGLV2-11 | 100 | IGLJ3 | SEQ ID NO: 446 | SEQ ID NO: 447 |
| COV_2173 | IGLV1-40 | 97.99 | IGLJ2; | SEQ ID NO: 286 | SEQ ID NO: 287 |
| | | | IGLJ3 | | |
| COV_2193 | IGLV3-19 | 97.58 | IGLJ3 | SEQ ID NO: 296 | SEQ ID NO: 297 |
| COV_2196 | IGLV3-27 | 95.94 | IGLJ3 | SEQ ID NO: 306 | SEQ ID NO: 307 |
| COV_3000 | IGKV2D-29 | 93.36 | IGKJ1 | SEQ ID NO: 316 | SEQ ID NO: 317 |
| COV_3005 | IGKV1-17 | 89.2 | IGKJ1 | SEQ ID NO: 326 | SEQ ID NO: 327 |
| COV_3013 | IGKV2D-29 | 95.35 | IGKJ1 | SEQ ID NO: 336 | SEQ ID NO: 337 |
| COV_3019 | IGKV2D-29 | 91.36 | IGKJ1 | SEQ ID NO: 346 | SEQ ID NO: 347 |
| COV_3028 | IGKV2D-29 | 89.7 | IGKJ1 | SEQ ID NO: 356 | SEQ ID NO: 357 |
| COV_3031 | IGKV2D-29 | 93.36 | IGKJ1 | SEQ ID NO: 366 | SEQ ID NO: 367 |
| COV_3033 | IGKV2D-29 | 90.37 | IGKJ1 | SEQ ID NO: 376 | SEQ ID NO: 377 |
| COV_3037 | IGKV2D-29 | 92.36 | IGKJ1 | SEQ ID NO: 386 | SEQ ID NO: 387 |
| COV_3040 | IGKV2-29; | 93.36 | IGKJ1 | SEQ ID NO: 396 | SEQ ID NO: 397 |
| | IGKV2D-29 | | | | |
| COV_3043 | IGKV2D-29 | 92.36 | IGKJ1 | SEQ ID NO: 406 | SEQ ID NO: 407 |
| COV_3053 | IGKV4-1 | 93.42 | IGKJ1 | SEQ ID NO: 416 | SEQ ID NO: 417 |
| COV_3088 | IGLV3-21 | 98.96 | IGLJ3 | SEQ ID NO: 426 | SEQ ID NO: 427 |
| CoV_1012 | IGLV1-47 | 99.66 | IGLJ2; | SEQ ID NO: 456 | SEQ ID NO: 457 |
| | | | IGLJ3 | | |
| CoV_1025 | IGKV1-39; | 100 | IGKJ4 | SEQ ID NO: 466 | SEQ ID NO: 467 |
| | IGKV1D-39 | | | | |
| CoV_1032 | IGKV1-39; | 95.32 | IGKJ1 | SEQ ID NO: 476 | SEQ ID NO: 477 |
| | IGKV1D-39 | | | | |
| CoV_1050 | IGLV3-25 | 93.62 | IGLJ3 | SEQ ID NO: 486 | SEQ ID NO: 487 |
| CoV_1056 | IGLV7-46 | 94.86 | IGLJ1 | SEQ ID NO: 496 | SEQ ID NO: 497 |
| CoV_1060 | IGLV2-14 | 97.98 | IGLJ3 | SEQ ID NO: 506 | SEQ ID NO: 507 |
| CoV_1063 | IGKV1-27 | 88.73 | IGKJ1 | SEQ ID NO: 516 | SEQ ID NO: 517 |
| CoV_1071 | IGKV2-24 | 95.02 | IGKJ1 | SEQ ID NO: 526 | SEQ ID NO: 527 |
| CoV_1076 | IGKV4-1 | 95.36 | IGKJ4 | SEQ ID NO: 536 | SEQ ID NO: 537 |
| CoV_1082 | IGKV2-24 | 94.02 | IGKJ1 | SEQ ID NO: 546 | SEQ ID NO: 547 |
| CoV_1085 | IGLV1-47 | 99.32 | IGLJ7 | SEQ ID NO: 556 | SEQ ID NO: 557 |
| CoV_1086 | IGKV2-24 | 97.67 | IGKJ2 | SEQ ID NO: 566 | SEQ ID NO: 567 |
| CoV_1087 | IGKV2-24 | 96.35 | IGKJ1 | SEQ ID NO: 576 | SEQ ID NO: 577 |
| CoV_1097 | IGLV1-40 | 97.99 | IGLJ3 | SEQ ID NO: 586 | SEQ ID NO: 587 |
| CoV_1116 | IGKV1-39; | 98.26 | IGKJ4 | SEQ ID NO: 596 | SEQ ID NO: 597 |
| | IGKV1D-39 | | | | |
| CoV_1118 | IGKV1-5 | 98.24 | IGKJ1 | SEQ ID NO: 606 | SEQ ID NO: 607 |
| CoV_1122 | IGLV1-44 | 98.99 | IGLJ3 | SEQ ID NO: 616 | SEQ ID NO: 617 |
| CoV_1131 | IGKV1-39; | 98.6 | IGKJ1 | SEQ ID NO: 626 | SEQ ID NO: 627 |
| | IGKV1D-39 | | | | |
| CoV_1136 | IGKV1-5 | 97.54 | IGKJ1 | SEQ ID NO: 636 | SEQ ID NO: 637 |
| CoV_1144 | IGKV1-39; | 98.24 | IGKJ1 | SEQ ID NO: 646 | SEQ ID NO: 647 |
| | IGKV1D-39 | | | | |
| CoV_1145 | IGLV3-10 | 98.97 | IGLJ3 | SEQ ID NO: 656 | SEQ ID NO: 657 |
| CoV_1149 | IGLV2-14 | 100 | IGLJ2; | SEQ ID NO: 666 | SEQ ID NO: 667 |
| | | | IGLJ3 | | |
| CoV_1151 | IGKV3-20 | 98.26 | IGKJ1 | SEQ ID NO: 676 | SEQ ID NO: 677 |
| CoV_1154 | IGKV1-5 | 97.89 | IGKJ1 | SEQ ID NO: 686 | SEQ ID NO: 687 |
| CoV_1165 | IGLV2-11 | 96.24 | IGLJ2; | SEQ ID NO: 696 | SEQ ID NO: 697 |
| | | | IGLJ3 | | |
| CoV_1166 | IGKV1-39; | 99.65 | IGKJ1 | SEQ ID NO: 706 | SEQ ID NO: 707 |
| | IGKV1D-39 | | | | |
| CoV_1170 | IGKV1-9 | 100 | IGKJ3 | SEQ ID NO: 716 | SEQ ID NO: 717 |
| CoV_1172 | IGKV1-39; | 98.24 | IGKJ3 | SEQ ID NO: 726 | SEQ ID NO: 727 |
| | IGKV1D-39 | | | | |
| CoV_1177 | IGLV3-21 | 100 | IGLJ3 | SEQ ID NO: 736 | SEQ ID NO: 737 |
| CoV_1184 | IGKV3-15 | 100 | IGKJ5 | SEQ ID NO: 746 | SEQ ID NO: 747 |
| CoV_1198 | IGKV3-15 | 97.54 | IGKJ2 | SEQ ID NO: 756 | SEQ ID NO: 757 |
| CoV_2032 | IGLV3-1 | 98.6 | IGLJ3 | SEQ ID NO: 766 | SEQ ID NO: 767 |
| CoV_2048 | IGLV2-11 | 99.66 | IGLJ2; | SEQ ID NO: 776 | SEQ ID NO: 777 |
| | | | IGLJ3 | | |
| CoV_2055 | IGKV2-30 | 100 | IGKJ5 | SEQ ID NO: 786 | SEQ ID NO: 787 |
| CoV_2056 | IGKV1-12 | 99.3 | IGKJ4 | SEQ ID NO: 796 | SEQ ID NO: 797 |
| CoV_2064 | IGKV1-5 | 92.96 | IGKJ2 | SEQ ID NO: 806 | SEQ ID NO: 807 |
| CoV_2066 | IGKV4-1 | 97.33 | IGKJ3 | SEQ ID NO: 816 | SEQ ID NO: 817 |
| CoV_2077 | IGKV1-39; | 99.3 | IGKJ2 | SEQ ID NO: 826 | SEQ ID NO: 827 |
| | IGKV1D-39 | | | | |
| CoV_2093 | IGKV1-39; | 97.9 | IGKJ4 | SEQ ID NO: 836 | SEQ ID NO: 837 |
| | IGKV1D-39 | | | | |
| CoV_2137 | IGLV2-23 | 98.99 | IGLJ1 | SEQ ID NO: 846 | SEQ ID NO: 847 |
| CoV_2143 | IGLV1-40 | 98.99 | IGLJ3 | SEQ ID NO: 856 | SEQ ID NO: 857 |
| CoV_2169 | IGKV3-20 | 98.24 | IGKJ2 | SEQ ID NO: 866 | SEQ ID NO: 867 |
| CoV_2172 | IGLV2-11 | 100 | IGLJ3 | SEQ ID NO: 876 | SEQ ID NO: 877 |
| CoV_2174 | IGKV1-16 | 99.65 | IGKJ4 | SEQ ID NO: 886 | SEQ ID NO: 887 |
| CoV_2205 | IGLV1-44 | 99.32 | IGLJ2; | SEQ ID NO: 896 | SEQ ID NO: 897 |
| | | | IGLJ3 | | |
| CoV_2215 | IGLV3-10 | 100 | IGLJ2; | SEQ ID NO: 906 | SEQ ID NO: 907 |
| | | | IGLJ3 | | |
| CoV_3049 | IGKV2-29; | 91.69 | IGKJ1 | SEQ ID NO: 916 | SEQ ID NO: 917 |
| | IGKV2D-29 | | | | |
| CoV_3069 | IGKV1-5 | 96.5 | IGKJ1 | SEQ ID NO: 926 | SEQ ID NO: 927 |
| CoV_3077 | IGKV1-5 | 99.65 | IGKJ4 | SEQ ID NO: 936 | SEQ ID NO: 937 |
| CoV_3079 | IGKV1-39; | 99.65 | IGKJ4 | SEQ ID NO: 946 | SEQ ID NO: 947 |
| | IGKV1D-39 | | | | |
| CoV_3100 | IGKV2D-29 | 92.03 | IGKJ1 | SEQ ID NO: 956 | SEQ ID NO: 957 |
| CoV_3103 | IGKV3-20 | 94.08 | IGKJ2 | SEQ ID NO: 966 | SEQ ID NO: 967 |
| CoV_3129 | IGKV3-11 | 94.01 | IGKJ5 | SEQ ID NO: 976 | SEQ ID NO: 977 |
| CoV_3137 | IGLV2-8 | 91.13 | IGLJ3 | SEQ ID NO: 986 | SEQ ID NO: 987 |

TABLE 3
SARS-CoV-2 Antibody Properties

| | | | KD(pM) | KD(pM) | SARS- |
|---|---|---|---|---|---|
| | Mean | Mean | SARS- | SARS- | CoV-2 |
| Antibody | IC50 | IC80 | CoV2- | CoV2- | Binding |
| Name | (μg/ml) | (μg/ml) | RBD | NTD | Epitope |
| COV_1007 | 9.00 | 25.0 | | | NTD |
| COV_1037 | 25.00 | 25.0 | | | NTD, RBD |
| COV_1045 | 25.00 | 25.0 | | | S2 |
| COV_1046 | 25.00 | 25.0 | | | S2 |
| COV_1201 | 0.09 | 0.30 | | | RBD |
| COV_2004 | 0.04 | 3.64 | | <1.0 | NTD |
| COV_2008 | 0.02 | 0.31 | | <1.0 | NTD |
| COV_2014 | 25.00 | 25.00 | | | NTD |
| COV_2018 | 0.31 | 1.27 | 47.0 | | RBD |
| COV_2024 | 9.59 | 25.0 | | | S2 |
| COV_2025 | 0.02 | 0.49 | | <1.0 | NTD |
| COV_2027 | 0.16 | 0.45 | | | RBD |
| COV_2028 | 25.00 | 25.00 | | 40.7 | NTD |
| COV_2035 | 0.04 | 25.00 | | <1.0 | NTD |
| COV_2037 | 0.07 | 25.00 | | <1.0 | NTD |
| COV_2039 | 0.01 | 1.80 | | <1.0 | NTD |
| COV_2054 | 25.00 | 25.00 | | <1.0 | NTD |
| COV_2056 | 13.20 | 25.00 | | | RBD |
| COV_2057 | 0.97 | 8.99 | <1.0 | | RBD |
| COV_2063 | 0.10 | 7.03 | <1.0 | | RBD |
| COV_2091 | 0.39 | 1.86 | 110.1 | | RBD |
| COV_2100 | 23.03 | 25.00 | 11.4 | | RBD |
| COV_2103 | 25.00 | 25.00 | | <1.0 | NTD |
| COV_2108 | 13.51 | 15.82 | <1.0 | | RBD |
| COV_2123 | 0.00 | 0.03 | 10.9 | | RBD |
| COV_2125 | 0.02 | 0.11 | 10.6 | | RBD |
| COV_2134 | 16.12 | 25.00 | 60.6 | | RBD |
| COV_2151 | 0.12 | 1.21 | <1.0 | | RBD |
| COV_2165 | 0.02 | 0.04 | 10.9 | | RBD |
| COV_2172 | 3.73 | 25.00 | | | RBD |
| COV_2173 | 0.00 | 0.01 | 21.2 | | RBD |
| COV_2193 | 25.00 | 25.0 | | | NTD |
| COV_2196 | 0.02 | 23.37 | | | NTD |
| COV_3000 | 25.00 | 25.00 | | | S2 |
| COV_3005 | 25.00 | 25.00 | | | S2 |
| COV_3013 | 25.00 | 25.00 | | | S2 |
| COV_3019 | 25.00 | 25.00 | | | S2 |
| COV_3028 | 25.00 | 25.00 | | | S2 |
| COV_3031 | 25.00 | 25.00 | | | S2 |
| COV_3033 | 25.00 | 25.00 | | | S2 |
| COV_3037 | 25.00 | 25.00 | | | S2 |
| COV_3040 | 25.00 | 25.00 | | | S2 |
| COV_3043 | 25.00 | 25.00 | | | S2 |
| COV_3053 | | | | | NTD, RBD |
| COV_3088 | 25.00 | 25.0 | | | RBD |
| CoV_1012 | 25 | 25 | | | S2 |
| CoV_1025 | | | | | S2 |
| CoV_1032 | 2.501 | 25 | | | S2 |
| CoV_1050 | 25 | 25 | | | S2 |
| CoV_1056 | 25.00 | 25.00 | | | S2 |
| CoV_1060 | 25.00 | 25.00 | | | S2 |
| CoV_1063 | 25.00 | 25.00 | | | S2 |
| CoV_1071 | 25.00 | 25.00 | | | S2 |
| CoV_1076 | 25.00 | 25.00 | | | S2 |
| CoV_1082 | 25.00 | 25.00 | | | S2 |
| CoV_1085 | | | | | S2 |
| CoV_1086 | 25.00 | 25.00 | | | S2 |
| CoV_1087 | 25.00 | 25.00 | | | S2 |
| CoV_1097 | | | | | S2 |
| CoV_1116 | 6.99 | 25.00 | | | S2 |
| CoV_1118 | | | | | S2 |
| CoV_1122 | | | | | S2 |
| CoV_1131 | 25.00 | 25.00 | | | S2 |
| CoV_1136 | | | | | S2 |
| CoV_1144 | 25.00 | 25.00 | | | S2 |
| CoV_1145 | | | | | S2 |
| CoV_1149 | 25.00 | 25.00 | | | S2 |
| CoV_1151 | 25.00 | 25.00 | | | S2 |
| CoV_1154 | | | | | S2 |
| CoV_1165 | | | | | S2 |
| CoV_1166 | 25.00 | 25.00 | | | S2 |
| CoV_1170 | 0.20 | 25.00 | | | S2 |
| CoV_1172 | 25.00 | 25.00 | | | S2 |
| CoV_1177 | | | | | S2 |
| CoV_1184 | | | | | S2 |
| CoV_1198 | 25.00 | 25.00 | | | S2 |
| CoV_2032 | | | | | S2 |
| CoV_2048 | 20.31 | 25.00 | | | S2 |
| CoV_2055 | | | | | S2 |
| CoV_2056 | 7.46 | 25.00 | | | RBD |
| CoV_2064 | 25.00 | 25.00 | | | S2 |
| CoV_2066 | 25.00 | 25.00 | | | S2 |
| CoV_2077 | 25.00 | 25.00 | | | S2 |
| CoV_2093 | 25.00 | 25.00 | | | S2 |
| CoV_2137 | | | | | NTD |
| CoV_2143 | 25.00 | 25.00 | | | S2 |
| CoV_2169 | | | | | S2 |
| CoV_2172 | 3.987 | 25 | | | RBD |
| CoV_2174 | 0.502 | 2.036 | | | RBD |
| CoV_2205 | | | | | S2 |
| CoV_2215 | | | | | S2 |
| CoV_3049 | | | | | S2 |
| CoV_3069 | | | | | |
| CoV_3077 | 25 | 25 | | | S2 |
| CoV_3079 | 25 | 25 | | | S2 |
| CoV_3100 | | | | | S2 |
| CoV_3103 | | | | | S2 |
| CoV_3129 | | | | | S1 |
| CoV_3137 | | | | | S2 |

TABLE 4
Cross Binding Ability of the SARS-CoV-2 Antibodies

| | Cross- | Cross- | Cross- | Cross- | Cross- | Cross- |
|---|---|---|---|---|---|---|
| Antibody | binding for | binding for | binding for | binding for | binding for | binding for |
| Name | SARS-CoV-1 | MERS-CoV | HCoV-229E | HCoV-HKU1 | HCoV-NL63 | HCoV-OC43 |
| COV_1007 | No | Yes | No | Yes | No | No |
| COV_1037 | Yes | Yes | Yes | Yes | Yes | Yes |
| COV_1045 | Yes | Yes | Yes | Yes | Yes | Yes |
| COV_1046 | Yes | Yes | Yes | Yes | Yes | Yes |
| COV_1201 | No | No | No | No | No | No |
| COV_2004 | No | No | No | No | No | Yes |
| COV_2008 | No | Yes | No | No | No | No |
| COV_2014 | No | No | No | No | No | No |
| COV_2018 | No | Yes | No | Yes | No | No |
| COV_2024 | Yes | Yes | Yes | Yes | Yes | No |
| COV_2025 | No | Yes | No | No | No | No |
| COV_2027 | No | Yes | No | No | No | No |
| COV_2028 | No | Yes | No | No | No | No |
| COV_2035 | No | Yes | No | Yes | No | No |
| COV_2037 | No | Yes | No | No | No | No |
| COV_2039 | No | Yes | No | No | No | No |
| COV_2054 | No | Yes | No | No | No | No |
| COV_2057 | No | Yes | No | No | No | No |
| COV_2063 | Yes | Yes | Yes | Yes | Yes | Yes |
| COV_2091 | No | Yes | No | No | No | No |
| COV_2100 | Yes | Yes | No | No | No | No |
| COV_2103 | No | Yes | No | No | No | No |
| COV_2108 | Yes | Yes | Yes | Yes | Yes | Yes |
| COV_2123 | Yes | Yes | Yes | No | No | No |
| COV_2125 | No | Yes | No | No | No | No |
| COV_2134 | Yes | Yes | No | No | No | No |
| COV_2151 | Yes | Yes | Yes | Yes | Yes | No |
| COV_2056 | Yes | Yes | Yes | Yes | Yes | No |
| COV_2165 | No | Yes | Yes | Yes | Yes | No |
| COV_2173 | No | Yes | No | No | No | No |
| COV_2173 | Yes | Yes | Yes | Yes | Yes | No |
| COV_2193 | Yes | Yes | No | No | No | No |
| COV_2196 | No | Yes | No | No | No | No |
| COV_3000 | Yes | Yes | Yes | Yes | Yes | Yes |
| COV_3005 | Yes | Yes | Yes | Yes | Yes | Yes |
| COV_3013 | Yes | Yes | Yes | Yes | Yes | Yes |
| COV_3019 | Yes | Yes | Yes | Yes | Yes | Yes |
| COV_3028 | Yes | Yes | Yes | Yes | Yes | Yes |
| COV_3031 | Yes | Yes | Yes | Yes | Yes | Yes |
| COV_3033 | Yes | Yes | Yes | Yes | Yes | Yes |
| COV_3037 | Yes | Yes | Yes | Yes | Yes | Yes |
| COV_3040 | Yes | Yes | Yes | Yes | Yes | Yes |
| COV_3043 | Yes | Yes | Yes | Yes | Yes | Yes |
| COV_3053 | No | No | No | No | No | No |
| COV_3088 | No | No | No | No | No | No |
| CoV_1012 | Yes | Yes | No | Yes | Yes | Yes |
| CoV_1025 | Yes | No | No | No | No | No |
| CoV_1032 | Yes | No | No | Yes | Yes | Yes |
| CoV_1050 | No | No | No | No | No | No |
| CoV_1056 | Yes | Yes | Yes | Yes | Yes | Yes |
| CoV_1060 | Yes | Yes | Yes | Yes | Yes | Yes |
| CoV_1063 | No | Yes | Yes | Yes | Yes | Yes |
| CoV_1071 | Yes | Yes | Yes | Yes | Yes | Yes |
| CoV_1076 | Yes | Yes | Yes | Yes | Yes | Yes |
| CoV_1082 | Yes | Yes | Yes | Yes | Yes | Yes |
| CoV_1085 | Yes | Yes | Yes | Yes | Yes | Yes |
| CoV_1086 | Yes | Yes | Yes | Yes | Yes | Yes |
| CoV_1087 | Yes | Yes | Yes | Yes | Yes | Yes |
| CoV_1097 | Yes | Yes | Yes | Yes | Yes | Yes |
| CoV_1116 | Yes | No | No | No | Yes | Yes |
| CoV_1118 | No | No | No | No | No | No |
| CoV_1122 | Yes | No | No | No | No | No |
| CoV_1131 | Yes | No | No | No | Yes | Yes |
| CoV_1136 | No | No | No | No | No | No |
| CoV_1144 | Yes | No | No | No | No | No |
| CoV_1145 | No | No | No | No | No | No |
| CoV_1149 | No | No | No | No | No | No |
| CoV_1151 | Yes | No | No | No | No | No |
| CoV_1154 | No | No | No | No | No | No |
| CoV_1165 | Yes | Yes | Yes | Yes | Yes | Yes |
| CoV_1166 | Yes | No | No | No | No | No |
| CoV_1170 | Yes | No | No | No | No | No |
| CoV_1172 | Yes | No | No | No | No | No |
| CoV_1177 | No | No | No | No | No | No |
| CoV_1184 | No | No | No | No | No | No |
| CoV_1198 | Yes | Yes | Yes | Yes | Yes | Yes |
| CoV_2032 | Yes | No | No | No | No | No |
| CoV_2048 | Yes | No | No | No | No | No |
| CoV_2055 | Yes | No | No | Yes | Yes | Yes |
| CoV_2056 | No | No | No | No | No | No |
| CoV_2064 | Yes | No | No | No | Yes | Yes |
| CoV_2066 | Yes | Yes | Yes | Yes | Yes | Yes |
| CoV_2077 | Yes | No | No | No | No | No |
| CoV_2093 | Yes | No | No | No | No | No |
| CoV_2137 | No | No | No | No | No | No |
| CoV_2143 | Yes | No | No | No | No | No |
| CoV_2169 | No | No | No | No | No | No |
| CoV_2172 | No | No | No | No | No | No |
| CoV_2174 | No | No | No | No | No | No |
| CoV_2205 | No | No | No | No | No | No |
| CoV_2215 | No | No | No | No | No | No |
| CoV_3049 | Yes | Yes | Yes | Yes | Yes | Yes |
| CoV_3069 | No | No | No | No | No | No |
| CoV_3077 | No | No | No | No | No | No |
| CoV_3079 | Yes | No | No | No | No | No |
| CoV_3100 | Yes | Yes | Yes | Yes | Yes | Yes |
| CoV_3103 | No | No | No | No | Yes | Yes |
| CoV_3129 | No | No | No | No | No | No |
| CoV_3137 | Yes | Yes | Yes | Yes | Yes | Yes |

### REFERENCES

[0381] 1. Gottlieb, R. L. et al. Effect of Bamlanivimab as Monotherapy or in Combination With Etesevimab on Viral Load in Patients With Mild to Moderate COVID-19: A Randomized Clinical Trial. JAMA 325, 632-644 (2021).
[0382] 2. O'Brien, M. P. et al. Subcutaneous REGEN-COV Antibody Combination to Prevent Covid-19. The New England journal of medicine 385, 1184-1195 (2021).
[0383] 3. Starr, T. N. et al. SARS-CoV-2 RBD antibodies that maximize breadth and resistance to escape. Nature 597, 97-102 (2021).
[0384] 4. Dong, J. et al. Genetic and structural basis for SARS-CoV-2 variant neutralization by a two-antibody cocktail. Nat Microbiol 6, 1233-1244 (2021).
[0385] 5. Martinez, D. R. et al. Prevention and therapy of SARS-CoV-2 and the B.1.351 variant in mice. Cell reports 36, 109450 (2021).
[0386] 6. Hoffmann, M. et al. SARS-CoV-2 Cell Entry Depends on ACE2 and TMPRSS2 and Is Blocked by a Clinically Proven Protease Inhibitor. Cell 181, 271-280 e278 (2020).
[0387] 7. McCallum, M. et al. N-terminal domain antigenic mapping reveals a site of vulnerability for SARS-CoV-2. Cell 184, 2332-2347 e2316 (2021).
[0388] 8. Cerutti, G. et al. Potent SARS-CoV-2 neutralizing antibodies directed against spike N-terminal domain target a single supersite. Cell host & microbe 29, 819-833 e817 (2021).
[0389] 9. Chen, R. E. et al. Resistance of SARS-CoV-2 variants to neutralization by monoclonal and serum-derived polyclonal antibodies. Nature medicine 27, 717-726 (2021).
[0390] 10. Planas, D. et al. Reduced sensitivity of SARS-CoV-2 variant Delta to antibody neutralization. Nature 596, 276-280 (2021).
[0391] 11. Hsieh, C. L. et al. Structure-based design of prefusion-stabilized SARS-CoV-2 spikes. Science 369, 1501-1505 (2020).
[0392] 12. Ju, B. et al. Human neutralizing antibodies elicited by SARS-CoV-2 infection. Nature 584, 115-119 (2020).
[0393] 13. Rogers, T. F. et al. Isolation of potent SARS-CoV-2 neutralizing antibodies and protection from disease in a small animal model. Science 369, 956-963 (2020).
[0394] 14. Robbiani, D. F. et al. Convergent antibody responses to SARS-CoV-2 in convalescent individuals. Nature 584, 437-442 (2020).
[0395] 15. Zost, S. J. et al. Potently neutralizing and protective human antibodies against SARS-CoV-2. Nature 584, 443-449 (2020).
[0396] 16. Tortorici, M. A. et al. Ultrapotent human antibodies protect against SARS-CoV-2 challenge via multiple mechanisms. Science 370, 950-957 (2020).
[0397] 17. Cao, Y. et al. Potent Neutralizing Antibodies against SARS-CoV-2 Identified by High-Throughput Single-Cell Sequencing of Convalescent Patients' B Cells. Cell 182, 73-84 e16 (2020).
[0398] 18. Joyce, M. G. et al. Efficacy of a Broadly Neutralizing SARS-CoV-2 Ferritin Nanoparticle Vaccine in Nonhuman Primates. bioRxiv htpps://doi.org/10.1101/2021.03.24.436523. (2021).
[0399] 19. Joyce, M. G. et al. SARS-CoV-2 ferritin nanoparticle vaccines elicit broad SARS coronavirus immunogenicity. bioRxiv htpps://doi.org/10.1101/2021.05.09.443331. (2021).
[0400] 20. Liu, L. et al. Potent neutralizing antibodies against multiple epitopes on SARS-CoV-2 spike. Nature 584, 450-456 (2020).
[0401] 21. Sholukh, A. M. et al. Evaluation of cell-based and surrogate SARS-CoV-2 neutralization assays. J Clin Microbiol 59, e0052721 (2021).
[0402] 22. Suryadevara, N. et al. Neutralizing and protective human monoclonal antibodies recognizing the N-terminal domain of the SARS-CoV-2 spike protein. Cell 184, 2316-2331 e2315 (2021).
[0403] 23. Winkler, E. S. et al. Human neutralizing antibodies against SARS-CoV-2 require intact Fc effector functions for optimal therapeutic protection. Cell 184, 1804-1820 e1816 (2021).
[0404] 24. Schafer, A. et al. Antibody potency, effector function, and combinations in protection and therapy for SARS-CoV-2 infection in vivo. The Journal of experimental medicine 218, e20201993 (2021).
[0405] 25. Ullah, I. et al. Live imaging of SARS-CoV-2 infection in mice reveals that neutralizing antibodies require Fc function for optimal efficacy. Immunity 54, 2143-2158 e2115 (2021).
[0406] 26. Chi, X. et al. A neutralizing human antibody binds to the N-terminal domain of the Spike protein of SARS-CoV-2. Science 369, 650-655 (2020).
[0407] 27. Voss, W. N. et al. Prevalent, protective, and convergent IgG recognition of SARS-CoV-2 non-RBD spike epitopes. Science 372, 1108-1112 (2021).
[0408] 28. Joyce, M. G. et al. A Cryptic Site of Vulnerability on the Receptor Binding Domain of the SARS-CoV-2 Spike Glycoprotein. bioRxiv https://doi.org/10.1101/2020.03.15.992883 (2020).
[0409] 29. Barnes, C. O. et al. SARS-CoV-2 neutralizing antibody structures inform therapeutic strategies. Nature 588, 682-687 (2020).
[0410] 30. Dejnirattisai, W. et al. The antigenic anatomy of SARS-CoV-2 receptor binding domain. Cell 184, 2183-2200 e2122 (2021).
[0411] 31. Liu, H. et al. A combination of cross-neutralizing antibodies synergizes to prevent SARS-CoV-2 and SARS-CoV pseudovirus infection. Cell host & microbe 29, 806-818 e806 (2021).
[0412] 32. Yuan, M. et al. A highly conserved cryptic epitope in the receptor binding domains of SARS-CoV-2 and SARS-CoV. Science 368, 630-633 (2020).
[0413] 33. Winkler, E. S. et al. SARS-CoV-2 infection of human ACE2-transgenic mice causes severe lung inflammation and impaired function. Nat Immunol21, 1327-1335 (2020).
[0414] 34. Oladunni, F. S. et al. Lethality of SARS-CoV-2 infection in K18 human angiotensin-converting enzyme 2 transgenic mice. Nat Commun 11, 6122 (2020).
[0415] 35. Lo, M. et al. Effector-attenuating Substitutions That Maintain Antibody Stability and Reduce Toxicity in Mice. The Journal of biological chemistry 292, 3900-3908 (2017).
[0416] 36. Weisblum, Y. et al. Escape from neutralizing antibodies by SARS-CoV-2 spike protein variants. Elife 9, e61312 (2020).
[0417] 37. Baum, A. et al. Antibody cocktail to SARS-CoV-2 spike protein prevents rapid mutational escape seen with individual antibodies. Science 369, 1014-1018 (2020).
[0418] 38. Zhou, H. et al. Structural definition of a neutralization epitope on the N-terminal domain of MERS-CoV spike glycoprotein. Nat Commun 10, 3068 (2019).
[0419] 39. Dussupt, V. et al. Potent Zika and dengue cross-neutralizing antibodies induced by Zika vaccination in a dengue-experienced donor. Nature medicine 26, 228-235 (2020).
[0420] 40. Wang, L. et al. Ultrapotent antibodies against diverse and highly transmissible SARS-CoV-2 variants. Science 373, eabhl766 (2021).
[0421] 41. Hansen, J. et al. Studies in humanized mice and convalescent humans yield a SARS-CoV-2 antibody cocktail. Science 369, 1010-1014 (2020).
[0422] 42. Andreano, E. et al. Extremely potent human monoclonal antibodies from COVID-19 convalescent patients. Cell 184, 1821-1835 (2021).
[0423] 43. Jones, B. E. et al. The neutralizing antibody, LY-CoV555, protects against SARS-CoV-2 infection in nonhuman primates. Science translational medicine 13, eabfl906 (2021).
[0424] 44. Sun, Y. et al. Structure-based development of three- and four-antibody cocktails against SARS-CoV-2 via multiple mechanisms. Cell Res 31, 597-600 (2021).
[0425] 45. Yan, R. et al. Structural basis for bivalent binding and inhibition of SARS-CoV-2 infection by human potent neutralizing antibodies. Cell Res 31, 517-525 (2021).
[0426] 46. Atyeo, C. et al. Distinct Early Serological Signatures Track with SARS-CoV-2 Survival. Immunity 53, 524-532 e524 (2020).
[0427] 47. Gorman, M. J. et al. Fab and Fc contribute to maximal protection against SARS-CoV-2 following NVX-CoV2373 subunit vaccine with Matrix-M vaccination. Cell Rep Med 2, 100405 (2021).
[0428] 48. Yuan, M. et al. Structural basis of a shared antibody response to SARS-CoV-2. Science 369, 1119-1123 (2020).
[0429] 49. Zhang, L. et al. A proof of concept for neutralizing antibody-guided vaccine design against SARS-CoV-2. Natl Sci Rev., nwab053 (2021).
[0430] 50. Shi, R. et al. A human neutralizing antibody targets the receptor-binding site of SARS-CoV-2. Nature 584, 120-124 (2020).
[0431] 51. Brown, E. P. et al. High-throughput, multiplexed IgG subclassing of antigen-specific antibodies from clinical samples. Journal of immunological methods 386, 117-123 (2012).
[0432] 52. Tomaras, G. D. et al. Initial B-cell responses to transmitted human immunodeficiency virus type 1: virion-binding immunoglobulin M (IgM) and IgG antibodies followed by plasma anti-gp41 antibodies with ineffective control of initial viremia. Journal of virology 82, 12449-12463 (2008).
[0433] 53. Moore, M. J. et al. Retroviruses pseudotyped with the severe acute respiratory syndrome coronavirus spike protein efficiently infect cells expressing angiotensin-converting enzyme 2. Journal of virology 78, 10628-10635 (2004).
[0434] 54. Kirchdoerfer, R. N. et al. Stabilized coronavirus spikes are resistant to conformational changes induced by receptor recognition or proteolysis. Scientific reports 8, 15701 (2018).
[0435] 55. Zhou, T. et al. Structure-Based Design with Tag-Based Purification and In-Process Biotinylation Enable Streamlined Development of SARS-CoV-2 Spike Molecular Probes. Cell reports 33, 108322 (2020).
[0436] 56. Ackerman, M. E. et al. A robust, high-throughput assay to determine the phagocytic activity of clinical antibody samples. Journal of immunological methods 366, 8-19 (2011).
[0437] 57. Fischinger, S. et al. A high-throughput, bead-based, antigen-specific assay to assess the ability of antibodies to induce complement activation. Journal of immunological methods 473, 112630 (2019).
[0438] 58. ter Meulen, J. et al. Human monoclonal antibody combination against SARS coronavirus: synergy and coverage of escape mutants. PLoS Med3, e237 (2006).
[0439] 59. Davidson, E. & Doranz, B. J. A high-throughput shotgun mutagenesis approach to mapping B-cell antibody epitopes. Immunology 143, 13-20 (2014).
[0440] 60. Strong, M. et al. Toward the structural genomics of complexes: crystal structure of a PE/PPE protein complex from Mycobacterium tuberculosis. Proceedings of the National Academy of Sciences of the United States ofAmerica 103, 8060-8065 (2006).
[0441] 61. McCoy, A. J. et al. Phaser crystallographic software. JAppl Crystallogr 40, 658-674 (2007).
[0442] 62. Emsley, P. & Cowtan, K. Coot: model-building tools for molecular graphics. Acta Crystallogr D Biol Crystallogr 60, 2126-2132 (2004).
[0443] 63. Adams, P. D., Mustyakimov, M., Afonine, P. V. & Langan, P. Generalized X-ray and neutron crystallographic analysis: more accurate and complete structures for biological macromolecules. Acta Crystallogr D Biol Crystallogr 65, 567-573 (2009).
[0444] 64. Otwinowski, Z. & Minor, W. Processing of X-ray diffraction data collected in oscillation mode. Methods Enzymol 276, 307-326 (1997).
[0445] 65. Scheres, S. H. RELION: implementation of a Bayesian approach to cryo-EM structure determination. J Struct Biol 180, 519-530 (2012).
[0446] 66. Punjani, A., Rubinstein, J. L., Fleet, D. J. & Brubaker, M. A. cryoSPARC: algorithms for rapid unsupervised cryo-EM structure determination. Nat Methods 14, 290-296 (2017).
[0447] 67. Pettersen, E. F. et al. UCSF Chimera-a visualization system for exploratory research and analysis. J Comput Chem 25, 1605-1612 (2004).

The application's sequence listing, which the Patent Office published only in electronic form, follows.

SEQUENCE LISTING (1258 sequences)

SEQ ID NO: 1 - DNA, 363 bp, Homo sapiens
  CDS (1)..(363)
  misc_feature (1)..(363): COV_1007
caggtcaccttgaaggagtctggtcctgtgctggtgaaacccacagagaccctcacgctgacctgcaccgtctctgggttctcactcatcaatgctagagtgggtgtgagctggatccgtcagcccccagggaaggccctggactggcttgcacacattttttcgagtgacgaaaaatcctacagcacatctctgaagagcaggctcaccatctccaaggacacctccaaaagccaggtggtccttaccatgaccaacatggaccctgtggacacagccacatattactgtgcacggattaggtggctatcctcttactactttgactactggggccagggaaccctggtcaccgtctcctca

SEQ ID NO: 2 - protein, 121 aa, Homo sapiens
QVTLKESGPVLVKPTETLTLTCTVSGFSLINARVGVSWIRQPPGKALDWLAHIFSSDEKSYSTSLKSRLTISKDTSKSQVVLTMTNMDPVDTATYYCARIRWLSSYYFDYWGQGTLVTVSS

SEQ ID NO: 3 - protein, 7 aa, Homo sapiens
  misc_feature: Heavy CDR1
NARVGVS

SEQ ID NO: 4 - protein, 16 aa, Homo sapiens
  misc_feature: Heavy CDR2
HIFSSDEKSYSTSLKS

SEQ ID NO: 5 - protein, 11 aa, Homo sapiens
  misc_feature: Heavy CDR3
IRWLSSYYFDY

SEQ ID NO: 6 - DNA, 321 bp, Homo sapiens
  CDS (1)..(321)
  misc_feature (1)..(321): COV_1007
gacatccgcatgacccagtctccatcttctgtgtctgcatctgtaggagacagagtcaccatcacttgtcgggcgagtcagggtattagcaactggttagcctggtatcagcagaaaccagggaaagcccctaagctcctgatctatgctgcatccagtttgcaaagtggggtcccatcaaggttcagcggcggtggatctgggacagatttcactctcactatcagcagcctgcagcctgaagattttgcaacttattattgtcaacaggctaacagtttcctgctcactttcggcggagggaccaaggtggagatcaaa

SEQ ID NO: 7 - protein, 107 aa, Homo sapiens
DIRMTQSPSSVSASVGDRVTITCRASQGISNWLAWYQQKPGKAPKLLIYAASSLQSGVPSRFSGGGSGTDFTLTISSLQPEDFATYYCQQANSFLLTFGGGTKVEIK

SEQ ID NO: 8 - protein, 11 aa, Homo sapiens
  misc_feature: Light CDR1
RASQGISNWLA

SEQ ID NO: 9 - protein, 7 aa, Homo sapiens
  misc_feature: Light CDR2
AASSLQS

SEQ ID NO: 10 - protein, 9 aa, Homo sapiens
  misc_feature: Light CDR3
QQANSFLLT

SEQ ID NO: 11 - DNA, 378 bp, Homo sapiens
  CDS (1)..(378)
  misc_feature (1)..(378): COV_1037
caggtgcagctggtggagtctgggggaggcgtggtccagcctgggaggtccctgagactctcctgtgcagcgtctggattcaccttcagtagctatggcatgcactgggtccgccaggctccaggcaaggggctggagtgggtggcagttatatggtatgatggaagtaataaatactatgcagactccgtgaagggccgattcaccatctccagagacaattccaagaacacgctgtatctgcaaatgaacagcctgagagccgaggacacggctgtgtattactgtgcgagaggtgggtaccagctgctatggcattactactactactacggtatggacgtctggggccaagggaccacggtcaccgtctcctca

SEQ ID NO: 12 - protein, 126 aa, Homo sapiens
QVQLVESGGGVVQPGRSLRLSCAASGFTFSSYGMHWVRQAPGKGLEWVAVIWYDGSNKYYADSVKGRFTISRDNSKNTLYLQMNSLRAEDTAVYYCARGGYQLLWHYYYYYGMDVWGQGTTVTVSS

SEQ ID NO: 13 - protein, 5 aa, Homo sapiens
  misc_feature: Heavy CDR1
SYGMH

SEQ ID NO: 14 - protein, 17 aa, Homo sapiens
  misc_feature: Heavy  CDR2
VIWYDGSNKYYADSVKG

SEQ ID NO: 15 - protein, 17 aa, Homo sapiens
  misc_feature: Heavy CDR3
GGYQLLWHYYYYYGMDV

SEQ ID NO: 16 - DNA, 336 bp, Homo sapiens
  CDS (1)..(336)
gatattgtgatgactcagtctccactctccctgcccgtcacccctggagagccggcctccatctcctgcaggtctagtcagagcctcctgcatagtaatggatacaactatttggattggtacctgcagaagccagggcagtctccacagctcctgatctatttgggttctaatcgggcctccggggtccctgacaggttcagtggcagtggatcaggcacagattttacactgaaaatcagcagagtggaggctgaggatgttggggtttattactgcatgcaagctctacaaactcctcgggctttcggccctgggaccaaagtggatatcaaa

SEQ ID NO: 17 - protein, 112 aa, Homo sapiens
DIVMTQSPLSLPVTPGEPASISCRSSQSLLHSNGYNYLDWYLQKPGQSPQLLIYLGSNRASGVPDRFSGSGSGTDFTLKISRVEAEDVGVYYCMQALQTPRAFGPGTKVDIK

SEQ ID NO: 18 - protein, 16 aa, Homo sapiens
  misc_feature: Light CDR1
RSSQSLLHSNGYNYLD

SEQ ID NO: 19 - protein, 7 aa, Homo sapiens
  misc_feature: light CDR2
LGSNRAS

SEQ ID NO: 20 - protein, 9 aa, Homo sapiens
  misc_feature: Light CDR3
MQALQTPRA

SEQ ID NO: 21 - DNA, 351 bp, Homo sapiens
  CDS (1)..(351)
  misc_feature (1)..(351): COV_1045
caggtgcacctggtgcagtctggggctgaggtgcagaaacctggggcctcagtgaagatttcctgcaaggcatctggggacaccctcagtgattcttatgtccactgggtgcgacaggcccctggaagcggacttgagtggatggggataatcaacactagggacggtgacacaaattacacacatcagttccaggacagagtcatgatgaccactgacacgtccacgagcacggtcttcttggagttgttcagcctgacttctgaggacacggccgtgtattactgtgcgagagccccagaccaatactttgactactggggccagggaagtccggtcaccgtctccgca

SEQ ID NO: 22 - protein, 117 aa, Homo sapiens
QVHLVQSGAEVQKPGASVKISCKASGDTLSDSYVHWVRQAPGSGLEWMGIINTRDGDTNYTHQFQDRVMMTTDTSTSTVFLELFSLTSEDTAVYYCARAPDQYFDYWGQGSPVTVSA

SEQ ID NO: 23 - protein, 5 aa, Homo sapiens
  misc_feature: Heavy CDR1
DSYVH

SEQ ID NO: 24 - protein, 17 aa, Homo sapiens
  misc_feature: Heavy CDR2
IINTRDGDTNYTHQFQD

SEQ ID NO: 25 - protein, 8 aa, Homo sapiens
  misc_feature: Heavy CDR3
APDQYFDY

SEQ ID NO: 26 - DNA, 336 bp, Homo sapiens
  CDS (1)..(336)
  misc_feature (1)..(336): COV_1045
gatattgtgatgacccagacaccactctcctcacctgtcacccttggacagccggcctccatctcctgtcggtctagtgaaagcctcgtacacagtaatgggaacacgtacttgagttggcttcagcagaggccaggccagcctccaagactcctaatttatagggtttctaaccgattctctggggtcccagacagattcagtggcagtggggcagggacagaattcacactgaaaatcagcagggtggaggctgaggatgtcggggtttattattgcatgcaagctagacattttcctcggacgttcggccaagggaccaaggtggaaatcaaa

SEQ ID NO: 27 - protein, 112 aa, Homo sapiens
DIVMTQTPLSSPVTLGQPASISCRSSESLVHSNGNTYLSWLQQRPGQPPRLLIYRVSNRFSGVPDRFSGSGAGTEFTLKISRVEAEDVGVYYCMQARHFPRTFGQGTKVEIK

SEQ ID NO: 28 - protein, 16 aa, Homo sapiens
  misc_feature: Light CDR1
RSSESLVHSNGNTYLS

SEQ ID NO: 29 - protein, 7 aa, Homo sapiens
  misc_feature: Light CDR2
RVSNRFS

SEQ ID NO: 30 - protein, 9 aa, Homo sapiens
  misc_feature: Light CFR3
MQARHFPRT

SEQ ID NO: 31 - DNA, 351 bp, Homo sapiens
  CDS (1)..(351)
  misc_feature (1)..(351): COV_1046
caggtgcagctggtgcagtctggggctgaggtacaaaagcctggggcctcagtgaaggtttcctgcaaggcatctggggacactttcagctactcttatgtccactgggtgcggcaggcccctggacacgggcttgagtggatgggaataatcaaccctagcaatggtgacacaaattacacacagaacttccagggcagagtcaccatgaccagtgacacgtccacgagcacggtcttgttggagttgagcagcctgacatctgacgacacggccgtgtattactgtgcgagagccccagaccaatactttgactactggggccagggaagtccggtcaccgtctccgct

SEQ ID NO: 32 - protein, 117 aa, Homo sapiens
QVQLVQSGAEVQKPGASVKVSCKASGDTFSYSYVHWVRQAPGHGLEWMGIINPSNGDTNYTQNFQGRVTMTSDTSTSTVLLELSSLTSDDTAVYYCARAPDQYFDYWGQGSPVTVSA

SEQ ID NO: 33 - protein, 5 aa, Homo sapiens
  misc_feature: Heavy CDR1
YSYVH

SEQ ID NO: 34 - protein, 17 aa, Homo sapiens
  misc_feature: Heavy CDR2
IINPSNGDTNYTQNFQG

SEQ ID NO: 35 - protein, 8 aa, Homo sapiens
  misc_feature: Heavy CDR3
APDQYFDY

SEQ ID NO: 36 - DNA, 336 bp, Homo sapiens
  CDS (1)..(336)
  misc_feature (1)..(336): COV_1046
gatattgtgatgacccagacaccactctcctcacctgtcacccttggacagccggcctccatctcctgtaggtctagtgaaagcctcgtacacagtgatgggaacacctacttgagttggcttcagcagaggccaggccagcctccaagactcctaatttatagggtttctaaccggttctctggggtcccagacagattcagtggcagtggggcagggacagatttcacactgaaaatcagcagggtggaggctgaggatgtcggggtttattactgcatgcaagctaaagattttcctcggacgttcggccaagggaccaaggtggaaatcaaa

SEQ ID NO: 37 - protein, 112 aa, Homo sapiens
DIVMTQTPLSSPVTLGQPASISCRSSESLVHSDGNTYLSWLQQRPGQPPRLLIYRVSNRFSGVPDRFSGSGAGTDFTLKISRVEAEDVGVYYCMQAKDFPRTFGQGTKVEIK

SEQ ID NO: 38 - protein, 16 aa, Homo sapiens
  misc_feature: Light CDR1
RSSESLVHSDGNTYLS

SEQ ID NO: 39 - protein, 7 aa, Homo sapiens
  misc_feature: Light CDR2
RVSNRFS

SEQ ID NO: 40 - protein, 9 aa, Homo sapiens
  misc_feature: Light CDR3
MQAKDFPRT

SEQ ID NO: 41 - DNA, 360 bp, Homo sapiens
  CDS (1)..(360)
  misc_feature (1)..(360): COV_1201
caggtgcagctggtgcagtctggggctgaggtgaagaagcctggggcctcaatgaaggtctcctgcaaggcttctggatacaccttcaccggctactatattcactgggtacgacaggcccctggacaagggcttgagtggatgggacggatcaaccctaacagtggtggcacaaactatgcacagaagtttcagggcagggtcaccatgaccagggacacgtccatcagcacagcctacatggagctgagcaggctgagatctgacgacacggccgtgtattactgtgcgagagaatattactatgtcccctacggtatggacgtctggggccaagggaccacggtcaccgtctcctca

SEQ ID NO: 42 - protein, 120 aa, Homo sapiens
QVQLVQSGAEVKKPGASMKVSCKASGYTFTGYYIHWVRQAPGQGLEWMGRINPNSGGTNYAQKFQGRVTMTRDTSISTAYMELSRLRSDDTAVYYCAREYYYVPYGMDVWGQGTTVTVSS

SEQ ID NO: 43 - protein, 5 aa, Homo sapiens
  misc_feature: Heavy CDR1
GYYIH

SEQ ID NO: 44 - protein, 17 aa, Homo sapiens
  misc_feature: Heavy CDR2
RINPNSGGTNYAQKFQG

SEQ ID NO: 45 - protein, 11 aa, Homo sapiens
  misc_feature: Heavy CDR3
EYYYVPYGMDV

SEQ ID NO: 46 - DNA, 330 bp, Homo sapiens
  CDS (1)..(330)
  misc_feature (1)..(330): COV_1201
cagtctgccctgactcagcctgcctccgtgtctgggtctcctggacagtcgatcaccatctcctgcactggaaccagcagtgacgttggtggttataactttgtctcctggtaccaacaccacccaggcaaagcccccaaactcatgatttatgaggtcagtaatcggccctcaggggtttctaatcgcttctctggctccaagtctggcaacacggcctccctgaccatctctgggctccaggctgaggacgaggctgattattactgcagctcatatacaagcagcagcacttatgtcttcggaactgggaccaaggtcaccgtccta

SEQ ID NO: 47 - protein, 110 aa, Homo sapiens
QSALTQPASVSGSPGQSITISCTGTSSDVGGYNFVSWYQHHPGKAPKLMIYEVSNRPSGVSNRFSGSKSGNTASLTISGLQAEDEADYYCSSYTSSSTYVFGTGTKVTVL

SEQ ID NO: 48 - protein, 14 aa, Homo sapiens
  misc_feature: Light CDR1
TGTSSDVGGYNFVS

SEQ ID NO: 49 - protein, 7 aa, Homo sapiens
  misc_feature: Light CDR2
EVSNRPS

SEQ ID NO: 50 - protein, 10 aa, Homo sapiens
  misc_feature: Light CDR3
SSYTSSSTYV

SEQ ID NO: 51 - DNA, 360 bp, Homo sapiens
  CDS (1)..(360)
  misc_feature (1)..(360): COV_2004
caggtgcagctggtgcagtctggggctgaggtgaagaagcctggggcctcagtgaaggtctcctgcaaggcttctggctacaccttcaccggctactatatgcactgggtgcgacaggcccctggacaagggcttgagtggatgggacggatcaaccctagcagtggtggcacaaactatgcacagaagtttcagggcagggtcaccatgaccagggacacgtccatcagcacagcctacatggagctgagcagcctcagatctgacgacacggccgtgtattactgtgcgacagatggcgacgacggggaaaactggttcgacccctggggccagggaaccctggtcatcgtctcctca

SEQ ID NO: 52 - protein, 120 aa, Homo sapiens
QVQLVQSGAEVKKPGASVKVSCKASGYTFTGYYMHWVRQAPGQGLEWMGRINPSSGGTNYAQKFQGRVTMTRDTSISTAYMELSSLRSDDTAVYYCATDGDDGENWFDPWGQGTLVIVSS

SEQ ID NO: 53 - protein, 5 aa, Homo sapiens
  misc_feature: COV_2004
  misc_feature: Heavy CDR1
GYYMH

SEQ ID NO: 54 - protein, 17 aa, Homo sapiens
  misc_feature: COV_2004
  misc_feature: Heavy CDR2
RINPSSGGTNYAQKFQG

SEQ ID NO: 55 - protein, 11 aa, Homo sapiens
  misc_feature: COV_2004
  misc_feature: Heavy CDR3
DGDDGENWFDP

SEQ ID NO: 56 - DNA, 321 bp, Homo sapiens
  CDS (1)..(321)
  misc_feature (1)..(321): COV_2004
gacatccagatgacccagtctccatcctcactgtctgcatctgtaggagacagagtcaccatcacttgtcgggcgagtcagggtattagcagctggttagcctggtatcagcagaaaccagagaaagcccctaagtccctgatctatgctgcatccagtttgcaaagtggggtcccatcgaggttcagcggcagtggatctgggacagatttcactctcaccatcagcagcctgcagcctgaagattttgcaacttattactgccaacagtataatagttatccgtacacttttggccaggggaccaagctggagatcaaa

SEQ ID NO: 57 - protein, 107 aa, Homo sapiens
DIQMTQSPSSLSASVGDRVTITCRASQGISSWLAWYQQKPEKAPKSLIYAASSLQSGVPSRFSGSGSGTDFTLTISSLQPEDFATYYCQQYNSYPYTFGQGTKLEIK

SEQ ID NO: 58 - protein, 11 aa, Homo sapiens
  misc_feature: COV_2004
  misc_feature: Light CDR1
RASQGISSWLA

SEQ ID NO: 59 - protein, 7 aa, Homo sapiens
  misc_feature: COV_2004
  misc_feature: Light CDR2
AASSLQS

SEQ ID NO: 60 - protein, 9 aa, Homo sapiens
  misc_feature: COV_2004
  misc_feature: Light CDR3
QQYNSYPYT

SEQ ID NO: 61 - DNA, 384 bp, Homo sapiens
  CDS (1)..(384)
  misc_feature (1)..(384): COV_2008
caggtccgggtggtacagtctggggctgaggtgaagaaccctggggcctcagtgaaggtctcctgcaaggtttccggatacaccctcactgaattatccatacactgggtgcgacaggctcctggaaacgggcttgagtggatgggaggttttgatcctgaagatggtgaaacaatctacgcacagaagttccagggcagagtcaccatgaccgaggacacatctacagacacagcctacatggagctgagcagcctgagatctgacgacacggccgtgtattactgtgcaacagccggtgcgataactggaacgccgagaaacttctactactactacggtatggacgtctggggccaggggaccacggtcaccgtctcctca

SEQ ID NO: 62 - protein, 128 aa, Homo sapiens
QVRVVQSGAEVKNPGASVKVSCKVSGYTLTELSIHWVRQAPGNGLEWMGGFDPEDGETIYAQKFQGRVTMTEDTSTDTAYMELSSLRSDDTAVYYCATAGAITGTPRNFYYYYGMDVWGQGTTVTVSS

SEQ ID NO: 63 - protein, 5 aa, Homo sapiens
  misc_feature: COV_2008
  misc_feature: Heavy CDR1
ELSIH

SEQ ID NO: 64 - protein, 17 aa, Homo sapiens
  misc_feature: COV_2008
  misc_feature: Heavy CDR2
GFDPEDGETIYAQKFQG

SEQ ID NO: 65 - protein, 19 aa, Homo sapiens
  misc_feature: COV_2008
  misc_feature: Heavy CDR3
AGAITGTPRNFYYYYGMDV

SEQ ID NO: 66 - DNA, 336 bp, Homo sapiens
  CDS (1)..(336)
  misc_feature (1)..(336): COV_2008
gatattgtgatgacccagactccactctcctcacctgtcacccttggacagccggcctccatctcctgcaggtctagtcaaagcctcgtacacagtgatggaaacacctacttgagttggcttcagcagaggccaggccagcctccaagactcctaatttataagatttctaaccggttctctggggtcccagacagattcagtggcagtggggcagggacagatttcacactgaaaatcagcagggtggaagctgaggatgtcggggtttattactgcatgcaagttacccaatttccgtacacttttggccaggggaccaagctggagatcaaa

SEQ ID NO: 67 - protein, 112 aa, Homo sapiens
DIVMTQTPLSSPVTLGQPASISCRSSQSLVHSDGNTYLSWLQQRPGQPPRLLIYKISNRFSGVPDRFSGSGAGTDFTLKISRVEAEDVGVYYCMQVTQFPYTFGQGTKLEIK

SEQ ID NO: 68 - protein, 16 aa, Homo sapiens
  misc_feature: COV_2008
  misc_feature: Light CDR1
RSSQSLVHSDGNTYLS

SEQ ID NO: 69 - protein, 9 aa, Homo sapiens
  misc_feature: COV_2008
  misc_feature: Light CDR2
QQYNSYPYT

SEQ ID NO: 70 - protein, 9 aa, Homo sapiens
  misc_feature: COV_2008
  misc_feature: Light CDR3
MQVTQFPYT

SEQ ID NO: 71 - DNA, 378 bp, Homo sapiens
  CDS (1)..(378)
  misc_feature (1)..(378): COV_2014
caggtgcagctggtacagtctggggctgaggtgaagaagcctggggcctcagtgaaggtctcctgcaaggtttccggatacaccctcactgaattatccatgcactgggtgcgacaggctcctggaaaagggcttgagtggatgggaggttttgatcctgaagatggtgaaacaatctacgcacagaagttccagggcagagtcaccatgaccgaggacacatctacagacacagcctacatggagctgagcagcctgagatctgaggacacggccgtgtattactgtgcaacaggaaaaataaattactatgatagtagtggttactacgggacttttgactactggggccagggaaccctggtcaccgtctcctca

SEQ ID NO: 72 - protein, 126 aa, Homo sapiens
QVQLVQSGAEVKKPGASVKVSCKVSGYTLTELSMHWVRQAPGKGLEWMGGFDPEDGETIYAQKFQGRVTMTEDTSTDTAYMELSSLRSEDTAVYYCATGKINYYDSSGYYGTFDYWGQGTLVTVSS

SEQ ID NO: 73 - protein, 5 aa, Homo sapiens
  misc_feature: COV_2014
  misc_feature: Heavy CDR1
ELSMH

SEQ ID NO: 74 - protein, 17 aa, Homo sapiens
  misc_feature: COV_2014
  misc_feature: Heavy CDR2
GFDPEDGETIYAQKFQG

SEQ ID NO: 75 - protein, 17 aa, Homo sapiens
  misc_feature: COV_2014
  misc_feature: Heavy CDR3
GKINYYDSSGYYGTFDY

SEQ ID NO: 76 - DNA, 321 bp, Homo sapiens
  CDS (1)..(321)
  misc_feature (1)..(321): COV_2014
gccatccagttgacccagtctccatcctccctgtctgcatctgtaggagacagagtcaccatcacttgccgggccagtcagggcattagcagttatttagcctggtatcagcaaaaaccagggaaagcccctaagctcctgatctatgctgcatccactttgcaaagtggggtcccatcaaggttcagcggcagtggatctgggacagatttcactctcaccatcagcagcctgcagcctgaagattttgcaacttattactgtcaacagcttaatagttaccatctcaccttcggccaagggacacgactggagattaaa

SEQ ID NO: 77 - protein, 107 aa, Homo sapiens
AIQLTQSPSSLSASVGDRVTITCRASQGISSYLAWYQQKPGKAPKLLIYAASTLQSGVPSRFSGSGSGTDFTLTISSLQPEDFATYYCQQLNSYHLTFGQGTRLEIK

SEQ ID NO: 78 - protein, 11 aa, Homo sapiens
  misc_feature: COV_2014
  misc_feature: Light CDR1
RASQGISSYLA

SEQ ID NO: 79 - protein, 7 aa, Homo sapiens
  misc_feature: COV_2014
  misc_feature: Light CDR2
AASTLQS

SEQ ID NO: 80 - protein, 9 aa, Homo sapiens
  misc_feature: COV_2014
  misc_feature: Light CDR3
QQLNSYHLT

SEQ ID NO: 81 - DNA, 369 bp, Homo sapiens
  CDS (1)..(369)
  misc_feature (1)..(369): COV_2018
caggtgcagctggtgcagtctggggctgaggtgaagaagcctgggtcctcggtgaaggtctcctgcaaggcttctggaggcacctccagcagctatgctatcagctgggtgcgacaggcccctggacaagggcttgagtggataggagggatcatccctatctttgatacaacaaagtacgcacagaagttccagggcagagtcacgattaccgcggacgaatctacgaacacagcctacatggaggtgagcagcctgagatctgaggacacggccgtgtattactgtgcgaaggtcgccgatagagtgggagcttctactggggaattggactactggggccagggaaccctggtcaccgtctcctca

SEQ ID NO: 82 - protein, 123 aa, Homo sapiens
QVQLVQSGAEVKKPGSSVKVSCKASGGTSSSYAISWVRQAPGQGLEWIGGIIPIFDTTKYAQKFQGRVTITADESTNTAYMEVSSLRSEDTAVYYCAKVADRVGASTGELDYWGQGTLVTVSS

SEQ ID NO: 83 - protein, 5 aa, Homo sapiens
  misc_feature: COV_2018
  misc_feature: Heavy CDR1
SYAIS

SEQ ID NO: 84 - protein, 17 aa, Homo sapiens
  misc_feature: COV_2018
  misc_feature: Heavy CDR2
GIIPIFDTTKYAQKFQG

SEQ ID NO: 85 - protein, 14 aa, Homo sapiens
  misc_feature: COV_2018
  misc_feature: Heavy CDR3
VADRVGASTGELDY

SEQ ID NO: 86 - DNA, 324 bp, Homo sapiens
  CDS (1)..(324)
  misc_feature (1)..(324): COV_2018
gaagttgtgttgacacagtctccagccaccctgtctttgtctccaggggaaagaggcaccctctcctgcagggccagtcagagtattagcaactacttagcctggtaccaacagaaacctggccaggctcccaggctcctcatctataatgcatccaacagggccactggcgtcccagccaggttcagtggcagtgggtctgggacagacttcactctcaccatcagcagcctggagcctgaggattttgcagtttattactgtcagcagcgtagcaactggcctccgtggacgttcggccaagggaccaaggtggaaatcaaa

SEQ ID NO: 87 - protein, 108 aa, Homo sapiens
EVVLTQSPATLSLSPGERGTLSCRASQSISNYLAWYQQKPGQAPRLLIYNASNRATGVPARFSGSGSGTDFTLTISSLEPEDFAVYYCQQRSNWPPWTFGQGTKVEIK

SEQ ID NO: 88 - protein, 11 aa, Homo sapiens
  misc_feature: COV_2018
  misc_feature: Light CDR1
RASQSISNYLA

SEQ ID NO: 89 - protein, 7 aa, Homo sapiens
  misc_feature: COV_2018
  misc_feature: Light CDR2
NASNRAT

SEQ ID NO: 90 - protein, 10 aa, Homo sapiens
  misc_feature: COV_2018
  misc_feature: Light CDR3
QQRSNWPPWT

SEQ ID NO: 91 - DNA, 363 bp, Homo sapiens
  CDS (1)..(363)
  misc_feature (1)..(363): COV_2024
caggtgcagctggtgcagtctggggctgaggtgaggaagcctgggtcctcggtgaaggtctcctgcaaggcttctggaggcaccttcagcacctatgctatcagctgggtgcgacaggcccctggacaagggcttgagtggatgggagggatcatccctatgtttggcacaacaaactacgcacagaagttccagggcagagtcacgataaccgcggacgagtccacgagaacagcctacatggagctgagcagcctgagatctgaggacacggccgtgtattactgtgcgcgagatgggggctacgattcttggcctgactttgactactggggccagggaaccctggtcaccgtctcctca

SEQ ID NO: 92 - protein, 121 aa, Homo sapiens
QVQLVQSGAEVRKPGSSVKVSCKASGGTFSTYAISWVRQAPGQGLEWMGGIIPMFGTTNYAQKFQGRVTITADESTRTAYMELSSLRSEDTAVYYCARDGGYDSWPDFDYWGQGTLVTVSS

SEQ ID NO: 93 - protein, 5 aa, Homo sapiens
  misc_feature: COV_2024
  misc_feature: Heavy CDR1
TYAIS

SEQ ID NO: 94 - protein, 17 aa, Homo sapiens
  misc_feature: COV_2024
  misc_feature: Heavy CDR2
GIIPMFGTTNYAQKFQG

SEQ ID NO: 95 - protein, 12 aa, Homo sapiens
  misc_feature: COV_2024
  misc_feature: Heavy CDR3
DGGYDSWPDFDY

SEQ ID NO: 96 - DNA, 327 bp, Homo sapiens
  CDS (1)..(327)
  misc_feature (1)..(327): COV_2024
gaaattgtgttgacacagtctccagccaccctgtctttgtctccaggggaaagagccaccctctcctgcagggccagtcagagtattagcagcttcttagcctggtaccaacagaaacctggccaggctcccaggctcctcatctatgatgcatccaacagggccactggcatcccagccaggttcagtggcagtgggtctgggacagacttcactctcaccgtcagcagcctagagcctgaagattttgcagtttattactgtcatcagcgtcgcaactggcctccaattaagacgttcggccaagggaccaaggtggacatcaaa

SEQ ID NO: 97 - protein, 109 aa, Homo sapiens
EIVLTQSPATLSLSPGERATLSCRASQSISSFLAWYQQKPGQAPRLLIYDASNRATGIPARFSGSGSGTDFTLTVSSLEPEDFAVYYCHQRRNWPPIKTFGQGTKVDIK

SEQ ID NO: 98 - protein, 11 aa, Homo sapiens
  misc_feature: COV_2024
  misc_feature: Light CDR1
RASQSISSFLA

SEQ ID NO: 99 - protein, 7 aa, Homo sapiens
  misc_feature: COV_2024
  misc_feature: Light CDR2
DASNRAT

SEQ ID NO: 100 - protein, 11 aa, Homo sapiens
  misc_feature: COV_2024
  misc_feature: Light CDR3
HQRRNWPPIKT

SEQ ID NO: 101 - DNA, 363 bp, Homo sapiens
  CDS (1)..(363)
  misc_feature (1)..(363): COV_2025
caggtccacctggtacagtctggggctgaggtgaagaagcctggggcctcagtgaaggtctcctgcaaggtttccggatacaccctcgttgaattatccgtgcactgggtgcgacaggctcctgcgaaagggcttgagtggataggaggttttgatcctgaagatggtgaaacaatctacgcacagaagttccagggcagagtcaccatgaccgaggacacatccacagacacagcctacatggaactgaccaacctgagatctgaggacacggccgtatattattgtgtaaccagccagccttttgtatccccgaactggttcgacccctggggccagggaaccctggtcaccgtctcctca

SEQ ID NO: 102 - protein, 121 aa, Homo sapiens
QVHLVQSGAEVKKPGASVKVSCKVSGYTLVELSVHWVRQAPAKGLEWIGGFDPEDGETIYAQKFQGRVTMTEDTSTDTAYMELTNLRSEDTAVYYCVTSQPFVSPNWFDPWGQGTLVTVSS

SEQ ID NO: 103 - protein, 5 aa, Homo sapiens
  misc_feature: COV_2025
  misc_feature: Heavy CDR1
ELSVH

SEQ ID NO: 104 - protein, 17 aa, Homo sapiens
  misc_feature: COV_2025
  misc_feature: Heavy CDR2
GFDPEDGETIYAQKFQG

SEQ ID NO: 105 - protein, 12 aa, Homo sapiens
  misc_feature: COV_2025
  misc_feature: Heavy CDR3
SQPFVSPNWFDP

SEQ ID NO: 106 - DNA, 333 bp, Homo sapiens
  CDS (1)..(330)
  misc_feature (1)..(330): COV_2025
cagtctgccctgactcagcctgcctccgtgtctgggtcgcctggacagtcgatcaccatctcctgcactggaaccagccgtgacgttggtgcttataactatgtctcctggtaccaacagcacccaggcaaagcccccaaactcatgatttatgaggtcactactcggccctcaggggtttctaatcgcttctctggctccaagtctggcaacacggcctccctgaccatctctgggctccaggctgaggacgaggctgattattactgcagctcatatacaggcagccgcactctcgtcttcggaactgggaccaaggtcaccgtcctacgt

SEQ ID NO: 107 - protein, 110 aa, Homo sapiens
QSALTQPASVSGSPGQSITISCTGTSRDVGAYNYVSWYQQHPGKAPKLMIYEVTTRPSGVSNRFSGSKSGNTASLTISGLQAEDEADYYCSSYTGSRTLVFGTGTKVTVL

SEQ ID NO: 108 - protein, 14 aa, Homo sapiens
  misc_feature: COV_2025
  misc_feature: Light CDR1
TGTSRDVGAYNYVS

SEQ ID NO: 109 - protein, 7 aa, Homo sapiens
  misc_feature: COV_2025
  misc_feature: Light CDR2
EVTTRPS

SEQ ID NO: 110 - protein, 10 aa, Homo sapiens
  misc_feature: COV_2025
  misc_feature: Light CDR3
SSYTGSRTLV

SEQ ID NO: 111 - DNA, 357 bp, Homo sapiens
  CDS (1)..(357)
  misc_feature (1)..(357): COV_2027
gaggtgcagctggtggagtctggaggaggcttgatccagcctggggggtccctgagactctcctgtgcagcctctgggttcagcgtcagtaccaactacatgagctgggtccgccaggctccagggaaggggctggagtgggtctcaattatttatagcggtggtggcacatactacgcagactccgtgaagggccgattcaccatctcgagagacacttccgagaacacgctgtatcttcaaatgaacagcctgagagccgaggacacggccgtgtattactgtgcgagttttctagtgggagctaccggacaaccgtggtactggggccagggaaccctggtcaccgtctcctca

SEQ ID NO: 112 - protein, 119 aa, Homo sapiens
EVQLVESGGGLIQPGGSLRLSCAASGFSVSTNYMSWVRQAPGKGLEWVSIIYSGGGTYYADSVKGRFTISRDTSENTLYLQMNSLRAEDTAVYYCASFLVGATGQPWYWGQGTLVTVSS

SEQ ID NO: 113 - protein, 5 aa, Homo sapiens
  misc_feature: COV_2027
  misc_feature: Heavy CDR1
TNYMS

SEQ ID NO: 114 - protein, 16 aa, Homo sapiens
  misc_feature: COV_2027
  misc_feature: Heavy CDR2
IIYSGGGTYYADSVKG

SEQ ID NO: 115 - protein, 11 aa, Homo sapiens
  misc_feature: COV_2027
  misc_feature: Heavy CDR3
FLVGATGQPWY

SEQ ID NO: 116 - DNA, 324 bp, Homo sapiens
  CDS (1)..(324)
  misc_feature (1)..(324): COV_2027
gaaattgtgttgacgcagtctccaggcaccctgtctttgtctccaggggaaagagccaccctctcctgcagggccagtcagagtgttagcagcagctacttagcctggtaccagcagaaacctggccaggctcccaggctcctcatctatggtgcatccagcagggccactggcatcccagacaggttcagtggcagtgggtctgggacagacttcactctcaccatcagcagactggagcctgaagattttgcagtgtattactgtcagcagtatggtagctcacctgtcacttttggccaggggaccaaggtggagatcaaa

SEQ ID NO: 117 - protein, 108 aa, Homo sapiens
EIVLTQSPGTLSLSPGERATLSCRASQSVSSSYLAWYQQKPGQAPRLLIYGASSRATGIPDRFSGSGSGTDFTLTISRLEPEDFAVYYCQQYGSSPVTFGQGTKVEIK

SEQ ID NO: 118 - protein, 12 aa, Homo sapiens
  misc_feature: COV_2027
  misc_feature: Light CDR1
RASQSVSSSYLA

SEQ ID NO: 119 - protein, 7 aa, Homo sapiens
  misc_feature: COV_2027
  misc_feature: Light CDR2
GASSRAT

SEQ ID NO: 120 - protein, 9 aa, Homo sapiens
  misc_feature: COV_2027
  misc_feature: Light CDR3
QQYGSSPVT

SEQ ID NO: 121 - DNA, 345 bp, Homo sapiens
  CDS (1)..(345)
  misc_feature (1)..(345): COV_2028
caggtgcagctgcaggagtcgggcccaggactggtgaagccttcggggaccctgtccctcacctgcgttgtctctggtggctccatcagcagtagtaactggtggagttgggtccgccagcccccagggaaggggctggagtggattggggaaatctatcatagtgggagcaccaactacaacccgtccctcaagagtcgagtcaccatatcagtagacaagtccaagaaccagttctccctgaggctgacctctgtgaccgccgcggacacggccgtgtattactgtgcgaggggctggaactacgactactggggccagggaaccctggtcaccgtctcctca

SEQ ID NO: 122 - protein, 115 aa, Homo sapiens
QVQLQESGPGLVKPSGTLSLTCVVSGGSISSSNWWSWVRQPPGKGLEWIGEIYHSGSTNYNPSLKSRVTISVDKSKNQFSLRLTSVTAADTAVYYCARGWNYDYWGQGTLVTVSS

SEQ ID NO: 123 - protein, 6 aa, Homo sapiens
  misc_feature: COV_2028
  misc_feature: Heavy CDR1
SSNWWS

SEQ ID NO: 124 - protein, 16 aa, Homo sapiens
  misc_feature: COV_2028
  misc_feature: Heavy CDR2
EIYHSGSTNYNPSLKS

SEQ ID NO: 125 - protein, 6 aa, Homo sapiens
  misc_feature: COV_2028
  misc_feature: Heavy CDR3
GWNYDY

SEQ ID NO: 126 - DNA, 330 bp, Homo sapiens
  CDS (1)..(330)
  misc_feature (1)..(330): COV_2028
cagtctgcgctgactcagcctgcctccgtgtctgggtctcctggacagtcgatcaccatcgcctgcactggaaccagcagtgatgttgggagttataaccttgtctcttggtaccaacagcacccaggcaaagcccccaaactcatgatttatgaggtcagtaagcggccctcagggctatctaatcgcttctctggctccaagtctggcaacacggcctccctgacaatctctgggctccaggctgaggacgaggctgattattactgctactcatatgcaggtagtagcacttgggtgttcggcggagggaccaagctgaccgtccta

SEQ ID NO: 127 - protein, 110 aa, Homo sapiens
QSALTQPASVSGSPGQSITIACTGTSSDVGSYNLVSWYQQHPGKAPKLMIYEVSKRPSGLSNRFSGSKSGNTASLTISGLQAEDEADYYCYSYAGSSTWVFGGGTKLTVL

SEQ ID NO: 128 - protein, 14 aa, Homo sapiens
  misc_feature: COV_2028
  misc_feature: Light CDR1
TGTSSDVGSYNLVS

SEQ ID NO: 129 - protein, 7 aa, Homo sapiens
  misc_feature: COV_2028
  misc_feature: Light CDR2
EVSKRPS

SEQ ID NO: 130 - protein, 10 aa, Homo sapiens
  misc_feature: COV_2028
  misc_feature: Light CDR3
YSYAGSSTWV

SEQ ID NO: 131 - DNA, 363 bp, Homo sapiens
  CDS (1)..(363)
  misc_feature (1)..(363): COV_2035
caggtgcagctggtacagtctggggctgaggtgaagaagcctggggcctcagtgaaggtctcctgcaaggtttccggatacaccctccctgaattatccatccactgggtgcgacaggctcctggaaaagggcttgagtggttgggaggttttgatcctgaagatggtaaaataatttacgcacagaagttccagggcagagtcaccatgaccgaggacacatctacagacacagcctacatggagctgagcagcctgagatctgaggacacggccgtgtattattgtgcaacaagcccagctgtggttgaaagagggtggttcgacccctggggccagggaaccctggtcaccgtctcctca

SEQ ID NO: 132 - protein, 121 aa, Homo sapiens
QVQLVQSGAEVKKPGASVKVSCKVSGYTLPELSIHWVRQAPGKGLEWLGGFDPEDGKIIYAQKFQGRVTMTEDTSTDTAYMELSSLRSEDTAVYYCATSPAVVERGWFDPWGQGTLVTVSS

SEQ ID NO: 133 - protein, 5 aa, Homo sapiens
  misc_feature: COV_2035
  misc_feature: Heavy CDR1
ELSIH

SEQ ID NO: 134 - protein, 17 aa, Homo sapiens
  misc_feature: COV_2035
  misc_feature: Heavy CDR2
GFDPEDGKIIYAQKFQG

SEQ ID NO: 135 - protein, 12 aa, Homo sapiens
  misc_feature: COV_2035
  misc_feature: Heavy CDR3
SPAVVERGWFDP

SEQ ID NO: 136 - DNA, 327 bp, Homo sapiens
  CDS (1)..(327)
  misc_feature (1)..(327): COV_2035
cagtctgccctgactcagcctccctccgcgtccgggtctcctggacagtcagtcaccatctcctgcactggaaccagcagtgacgttggtggttataactatgtctcctggtaccaacagcacccaggcaaagcccccaaactcatgatttatgaggtcagtaagcggccctcaggggtccctgatcgcttctctggctccaagtctggcaacatggcctccctgaccgtctctgggctccaggctgaggatgaggctaattattactgcagctcatatgcaggcagcaaaagggtattcggcggagggaccaagctgaccgtccta

SEQ ID NO: 137 - protein, 109 aa, Homo sapiens
QSALTQPPSASGSPGQSVTISCTGTSSDVGGYNYVSWYQQHPGKAPKLMIYEVSKRPSGVPDRFSGSKSGNMASLTVSGLQAEDEANYYCSSYAGSKRVFGGGTKLTVL

SEQ ID NO: 138 - protein, 14 aa, Homo sapiens
  misc_feature: COV_2035
  misc_feature: Light CDR1
TGTSSDVGGYNYVS

SEQ ID NO: 139 - protein, 7 aa, Homo sapiens
  misc_feature: COV_2035
  misc_feature: Light CDR2
EVSKRPS

SEQ ID NO: 140 - protein, 9 aa, Homo sapiens
  misc_feature: COV_2035
  misc_feature: Light CDR3
SSYAGSKRV

SEQ ID NO: 141 - DNA, 384 bp, Homo sapiens
  CDS (1)..(384)
  misc_feature (1)..(384): COV_2037
caggtgcagctggtacagtctggggctgaggtgaagaagcctggggcctcagtgaaggtctcctgcaaggtttccggatacaccctcactgaattatccatgcactgggtgcgacaggctcctggaaaagggcttgagtggatgggaggttttgatcctgaagatgctgaaacaatctacgcacagaagtttcagggcagagtcaccatgaccgaggacacatctacagacacagcctacatggagctgagcagcctgagatctgaggacacggccgtgtattactgtgcaacagccggtgcgataactggaacgccgacaaattactcctactactacggtatggacttctggggccaagggaccacggtcaccgtctcctca

SEQ ID NO: 142 - protein, 128 aa, Homo sapiens
QVQLVQSGAEVKKPGASVKVSCKVSGYTLTELSMHWVRQAPGKGLEWMGGFDPEDAETIYAQKFQGRVTMTEDTSTDTAYMELSSLRSEDTAVYYCATAGAITGTPTNYSYYYGMDFWGQGTTVTVSS

SEQ ID NO: 143 - protein, 5 aa, Homo sapiens
  misc_feature: COV_2037
  misc_feature: Heavy CDR1
ELSMH

SEQ ID NO: 144 - protein, 17 aa, Homo sapiens
  misc_feature: COV_2037
  misc_feature: Heavy CDR2
GFDPEDAETIYAQKFQG

SEQ ID NO: 145 - protein, 19 aa, Homo sapiens
  misc_feature: COV_2037
  misc_feature: Heavy CDR3
AGAITGTPTNYSYYYGMDF

SEQ ID NO: 146 - DNA, 336 bp, Homo sapiens
  CDS (1)..(336)
  misc_feature (1)..(336): COV_2037
gatattgtgatgacccagactccactctcctcacctgtcacccttggacagccagcctccatctcctgcaggtctagtcaaagcctcgtacacagtgatggaaacacctacttgagttggcttcagcagaggccaggccagcctccaagactcctaatttataagatttctaaccggttctctggggtcccagacagattcagtggcagtggggcagggacagatttcacactgaggatcagcagggtggaagctgaggatgtcggactttattactgcatgcaagctacacaatttccgtacacttttggccaggggaccaagctggagatcaaa

SEQ ID NO: 147 - protein, 112 aa, Homo sapiens
DIVMTQTPLSSPVTLGQPASISCRSSQSLVHSDGNTYLSWLQQRPGQPPRLLIYKISNRFSGVPDRFSGSGAGTDFTLRISRVEAEDVGLYYCMQATQFPYTFGQGTKLEIK

SEQ ID NO: 148 - protein, 16 aa, Homo sapiens
  misc_feature: COV_2037
  misc_feature: Light CDR1
RSSQSLVHSDGNTYLS

SEQ ID NO: 149 - protein, 7 aa, Homo sapiens
  misc_feature: COV_2037
  misc_feature: Light CDR2
KISNRFS

SEQ ID NO: 150 - protein, 9 aa, Homo sapiens
  misc_feature: COV_2037
  misc_feature: Light CDR3
MQATQFPYT

SEQ ID NO: 151 - DNA, 360 bp, Homo sapiens
  CDS (1)..(360)
  misc_feature (1)..(360): COV_2039
caggtgcagctggtacagtctggggctgaggtgaagaagcctggggcctcagtgaaggtctcctgcaaggtttccggatacatgctcattgaattatccatgcactgggtgcgacaggctcctggaaaagggcttgagtggatgggaggttttgatcctgaagatgctgaaacaatctacgcacaggagttccagggcagagtcaccatgaccgaggacacatctacagacacagcctacatggagctgagcagcctgagatctgaggacacggccgtgtattactgtacaacaggcccggcggtgactaacagacccgctgactactggggcccgggaaccctggtcaccgtctcctca

SEQ ID NO: 152 - protein, 120 aa, Homo sapiens
QVQLVQSGAEVKKPGASVKVSCKVSGYMLIELSMHWVRQAPGKGLEWMGGFDPEDAETIYAQEFQGRVTMTEDTSTDTAYMELSSLRSEDTAVYYCTTGPAVTNRPADYWGPGTLVTVSS

SEQ ID NO: 153 - protein, 5 aa, Homo sapiens
  misc_feature: COV_2039
  misc_feature: Heavy CDR1
ELSMH

SEQ ID NO: 154 - protein, 17 aa, Homo sapiens
  misc_feature: COV_2039
  misc_feature: Heavy CDR2
GFDPEDAETIYAQEFQG

SEQ ID NO: 155 - protein, 11 aa, Homo sapiens
  misc_feature: COV_2039
  misc_feature: Heavy CDR3
GPAVTNRPADY

SEQ ID NO: 156 - DNA, 336 bp, Homo sapiens
  CDS (1)..(336)
  misc_feature (1)..(336): COV_2039
cagtctgtcctgacgcagccgccctcagtgtctggggccccagggcagagggtcaccatctcctgcactgggagcagctccaacatcggggcaagttatgatgtacactggtaccagcagcttccaggaacagcccccaaactcctcatctatgctaacagcaatcggccctcaggggtccctgaccgattctctggctccaagtctggcacctcagcctccctggccatcactgggctccaggctgaggatgaggctgattattactgccagtcctatgacagcagcctgagttattccgtggtattcggcggagggaccaagctgaccgtccta

SEQ ID NO: 157 - protein, 112 aa, Homo sapiens
QSVLTQPPSVSGAPGQRVTISCTGSSSNIGASYDVHWYQQLPGTAPKLLIYANSNRPSGVPDRFSGSKSGTSASLAITGLQAEDEADYYCQSYDSSLSYSVVFGGGTKLTVL

SEQ ID NO: 158 - protein, 14 aa, Homo sapiens
  misc_feature: COV_2039
  misc_feature: Light CDR1
TGSSSNIGASYDVH

SEQ ID NO: 159 - protein, 7 aa, Homo sapiens
  misc_feature: COV_2039
  misc_feature: Light CDR2
ANSNRPS

SEQ ID NO: 160 - protein, 12 aa, Homo sapiens
  misc_feature: COV_2039
  misc_feature: Light CDR3
QSYDSSLSYSVV

SEQ ID NO: 161 - DNA, 372 bp, Homo sapiens
  CDS (1)..(372)
  misc_feature (1)..(372): COV_2054
gaggtgcagctggtggagtctgggggaggcgtgctccagcctgggaggtccctgagactctcctgtgcagcctctggattcaccttcaataactatgctttgcactgggtccgccaggctccaggcaaggggctggagtgggtcgcagttatatcatatgatggaagcagtaaatactacgcagactccgtgaggggccgactcaccatctccagagacaattccaggaacaccctgtatctgcaaatgaacagcctgagacctgaggacacggctatttattactgtgcgagagatggagacggactatggctcggggagtcattctactttgacgactggggccagggaaccctggtcaccgtctcctca

SEQ ID NO: 162 - protein, 124 aa, Homo sapiens
EVQLVESGGGVLQPGRSLRLSCAASGFTFNNYALHWVRQAPGKGLEWVAVISYDGSSKYYADSVRGRLTISRDNSRNTLYLQMNSLRPEDTAIYYCARDGDGLWLGESFYFDDWGQGTLVTVSS

SEQ ID NO: 163 - protein, 5 aa, Homo sapiens
  misc_feature: COV_2054
  misc_feature: Heavy CDR1
NYALH

SEQ ID NO: 164 - protein, 17 aa, Homo sapiens
  misc_feature: COV_2054
  misc_feature: Heavy CDR2
VISYDGSSKYYADSVRG

SEQ ID NO: 165 - protein, 15 aa, Homo sapiens
  misc_feature: COV_2054
  misc_feature: Heavy CDR3
DGDGLWLGESFYFDD

SEQ ID NO: 166 - DNA, 321 bp, Homo sapiens
  CDS (1)..(321)
  misc_feature (1)..(321): COV_2054
gacatccagatgacccagtctccttccaccctgtctgcatctgtaggagacagagtcatcatcacttgccgggccagccagagtattagtagctggttggcctggtatcagcagaaaccagggaaagcccctaagctcctgatctatgaggcatctactttacaaagtggggtcccatcaaggttcagcggcagtggatctgggacagaattcactctcaccatcagcagcctgcagcctgatgattctgcaacttattactgccaacagtataatagttaccccgtacactttagccaggggaccaagctggagatcaaa

SEQ ID NO: 167 - protein, 107 aa, Homo sapiens
DIQMTQSPSTLSASVGDRVIITCRASQSISSWLAWYQQKPGKAPKLLIYEASTLQSGVPSRFSGSGSGTEFTLTISSLQPDDSATYYCQQYNSYPVHFSQGTKLEIK

SEQ ID NO: 168 - protein, 11 aa, Homo sapiens
  misc_feature: COV_2054
  misc_feature: Light CDR1
RASQSISSWLA

SEQ ID NO: 169 - protein, 7 aa, Homo sapiens
  misc_feature: COV_2054
  misc_feature: Light CDR2
EASTLQS

SEQ ID NO: 170 - protein, 9 aa, Homo sapiens
  misc_feature: COV_2054
  misc_feature: Light CDR3
QQYNSYPVH

SEQ ID NO: 171 - DNA, 363 bp, Homo sapiens
  CDS (1)..(363)
  misc_feature (1)..(363): COV_2057
gaggtgcagctggtgcagtctggagcagaggtgaaaaagcccggggagtctctgaagatctcctgtaagggttccggatacagttttatcagctactggatcgcctgggtgcgccagatgcccgggaaaggcctggagtggatggggatcatctatcctggtgactctgataccacatacagcccgtccttccaaggccaggtcaccatctcagccgacaagtccatcagcaccgcctacctgcagtggagcagcctgaaggcctcggacaccgccatttattattgtgcgagacttctatattactctgatagtagccctcttgactcctggggccagggaaccctggtcaccgtctcctca

SEQ ID NO: 172 - protein, 121 aa, Homo sapiens
EVQLVQSGAEVKKPGESLKISCKGSGYSFISYWIAWVRQMPGKGLEWMGIIYPGDSDTTYSPSFQGQVTISADKSISTAYLQWSSLKASDTAIYYCARLLYYSDSSPLDSWGQGTLVTVSS

SEQ ID NO: 173 - protein, 5 aa, Homo sapiens
  misc_feature: COV_2057
  misc_feature: Heavy CDR1
SYWIA

SEQ ID NO: 174 - protein, 17 aa, Homo sapiens
  misc_feature: COV_2057
  misc_feature: Heavy CDR2
IIYPGDSDTTYSPSFQG

SEQ ID NO: 175 - protein, 12 aa, Homo sapiens
  misc_feature: COV_2057
  misc_feature: Heavy CDR3
LLYYSDSSPLDS

SEQ ID NO: 176 - DNA, 321 bp, Homo sapiens
  CDS (1)..(321)
  misc_feature (1)..(321): COV_2057
gacatccagatgacccagtctccatcctccctgtctgcatctgtaggagacagagtcaccatcacttgccgggcaagtcagagtattagcacctatttaaattggtatcagcagaaaccagggaaagcccctaacctcctgatctatgctgcatccagtttgcaaagtggggtcccatcaaggttcagtggcagtggatctgggacagatttcactctcaccatcagcagtctgcaacctgaagattttgcaacttactactgtcaacagagtcacagtaccccccggactttcggccctgggaccaaagtggatatcaaa

SEQ ID NO: 177 - protein, 107 aa, Homo sapiens
DIQMTQSPSSLSASVGDRVTITCRASQSISTYLNWYQQKPGKAPNLLIYAASSLQSGVPSRFSGSGSGTDFTLTISSLQPEDFATYYCQQSHSTPRTFGPGTKVDIK

SEQ ID NO: 178 - protein, 11 aa, Homo sapiens
  misc_feature: COV_2057
  misc_feature: Light CDR1
RASQSISTYLN

SEQ ID NO: 179 - protein, 7 aa, Homo sapiens
  misc_feature: COV_2057
  misc_feature: Light CDR2
AASSLQS

SEQ ID NO: 180 - protein, 9 aa, Homo sapiens
  misc_feature: COV_2057
  misc_feature: Light CDR3
QQSHSTPRT

SEQ ID NO: 181 - DNA, 372 bp, Homo sapiens
  CDS (1)..(372)
  misc_feature (1)..(372): COV_2063
gaggtgcagctggtggagtctgggggaggcgtggtccagcctgggaggtccctgagactctcctgtgcagcgtctggattcaccttcagcagctatggcatgcactgggtccgccaggctccaggcaaggggctggagtgggtggcagttatatggtatgatggaagtaataaatactatgcagactccgtgaagggccgattcaccatctccagagacaattccaagaatacgctgtatctgcaaatgaacagcctgagagccgaggacacggctgtgtattactgtgcgagaggtcccctcgggagtaattatttcaattatgatgcttttgatatctggggccaagggacaatggtcaccgtctcttca

SEQ ID NO: 182 - protein, 124 aa, Homo sapiens
EVQLVESGGGVVQPGRSLRLSCAASGFTFSSYGMHWVRQAPGKGLEWVAVIWYDGSNKYYADSVKGRFTISRDNSKNTLYLQMNSLRAEDTAVYYCARGPLGSNYFNYDAFDIWGQGTMVTVSS

SEQ ID NO: 183 - protein, 5 aa, Homo sapiens
  misc_feature: COV_2063
  misc_feature: Heavy CDR1
SYGMH

SEQ ID NO: 184 - protein, 17 aa, Homo sapiens
  misc_feature: COV_2063
  misc_feature: Heavy CDR2
VIWYDGSNKYYADSVKG

SEQ ID NO: 185 - protein, 15 aa, Homo sapiens
  misc_feature: COV_2063
  misc_feature: Heavy CDR3
GPLGSNYFNYDAFDI

SEQ ID NO: 186 - DNA, 336 bp, Homo sapiens
  CDS (1)..(336)
  misc_feature (1)..(336): COV_2063
gatgttgtgatgactcagtctccactctccctgcccgtcacccttggacagccggcctccatctcctgcaggtctagtcaaagcctcgaatacagtgatggaaacacctacttgaattggtttcagcagaggccaggccaatctccaaggcgcctaatttataaggtttctaagcgggactctggggtcccagacagattcagcggcagtgggtcaggcagtgatttcacactgaaaatcagcagggtggaggctgaggatgttggggtttattactgcatgcaaggtacacactggcctctcactttcggcggagggaccaaggtggagatcaaa

SEQ ID NO: 187 - protein, 112 aa, Homo sapiens
DVVMTQSPLSLPVTLGQPASISCRSSQSLEYSDGNTYLNWFQQRPGQSPRRLIYKVSKRDSGVPDRFSGSGSGSDFTLKISRVEAEDVGVYYCMQGTHWPLTFGGGTKVEIK

SEQ ID NO: 188 - protein, 16 aa, Homo sapiens
  misc_feature: COV_2063
  misc_feature: Light CDR1
RSSQSLEYSDGNTYLN

SEQ ID NO: 189 - protein, 7 aa, Homo sapiens
  misc_feature: COV_2063
  misc_feature: Light CDR2
KVSKRDS

SEQ ID NO: 190 - protein, 9 aa, Homo sapiens
  misc_feature: COV_2063
  misc_feature: Light CDR3
MQGTHWPLT

SEQ ID NO: 191 - DNA, 375 bp, Homo sapiens
  CDS (1)..(375)
  misc_feature (1)..(375): COV_2091
gaagtgcagctggtggagtctgggggaggcttggtaaagcctggggggtcccttagactctcctgtgcagcctctggattcactttcagtaacgcctggatgagctgggtccgccaggctccagggaaggggctggagtgggttggccgtattaaaagcaaaactgatggtgggacaacagactacgctgcacccgtgaaaggcagattcaccatctcaagagatgattcaaaaaacacgctgtatctgcaaatgaacagcctgaaaaccgaggacacagccgtgtattactgtaccacagagtactcgagtatagcagctcggattgatgcttttgatatctggggccaagggacaatggtcaccgtctcttca

SEQ ID NO: 192 - protein, 125 aa, Homo sapiens
EVQLVESGGGLVKPGGSLRLSCAASGFTFSNAWMSWVRQAPGKGLEWVGRIKSKTDGGTTDYAAPVKGRFTISRDDSKNTLYLQMNSLKTEDTAVYYCTTEYSSIAARIDAFDIWGQGTMVTVSS

SEQ ID NO: 193 - protein, 5 aa, Homo sapiens
  misc_feature: COV_2091
  misc_feature: Heavy CDR1
NAWMS

SEQ ID NO: 194 - protein, 19 aa, Homo sapiens
  misc_feature: COV_2091
  misc_feature: Heavy CDR2
RIKSKTDGGTTDYAAPVKG

SEQ ID NO: 195 - protein, 14 aa, Homo sapiens
  misc_feature: COV_2091
  misc_feature: Heavy CDR3
EYSSIAARIDAFDI

SEQ ID NO: 196 - DNA, 324 bp, Homo sapiens
  CDS (1)..(324)
  misc_feature (1)..(324): COV_2091
gacatccagatgacccagtctccatcctccctgtctgcatctgtaggagacagagtcaccatcacttgccgggcaagtcagagcattagcagctatttaaattggtatcagcagaaaccagggaaagcccctaagctcctgatctatgctgcatccagtttgcaaagtggggtcccatcaaggttcagtggcagtggatctgggacagatttcactctcaccatcagcagtctgcaacctgaagattttgcaacttactactgtcaacagagttacagtacccctcgactcactttcggcggagggaccaaggtggagatcaaa

SEQ ID NO: 197 - protein, 108 aa, Homo sapiens
DIQMTQSPSSLSASVGDRVTITCRASQSISSYLNWYQQKPGKAPKLLIYAASSLQSGVPSRFSGSGSGTDFTLTISSLQPEDFATYYCQQSYSTPRLTFGGGTKVEIK

SEQ ID NO: 198 - protein, 11 aa, Homo sapiens
  misc_feature: COV_2091
  misc_feature: Light CDR1
RASQSISSYLN

SEQ ID NO: 199 - protein, 7 aa, Homo sapiens
  misc_feature: COV_2091
  misc_feature: Light CDR2
AASSLQS

SEQ ID NO: 200 - protein, 10 aa, Homo sapiens
  misc_feature: COV_2091
  misc_feature: Light CDR3
QQSYSTPRLT

SEQ ID NO: 201 - DNA, 357 bp, Homo sapiens
  CDS (1)..(357)
  misc_feature (1)..(357): COV_2100
gaggtgcagctggtggaatctgggggaggcttggtacagcctggggggtccctgagactctcctgtgcagcctctggattcaccttcagtagctacgacatgtactgggtccgccaagctacaggaaaaggtctggagtgggtctcagctattggtactgctggtgacacatactatccaggctccgtgaagggccgattcaccatctccagagaaaatgccaagaactccttgtatcttcgaatgaacagcctgagagccggggacacggctgtgtatttctgtgcaagagccgataaaaatacagctatgttctttgactactggggccagggaaccctggtcaccgtctcctca

SEQ ID NO: 202 - protein, 119 aa, Homo sapiens
EVQLVESGGGLVQPGGSLRLSCAASGFTFSSYDMYWVRQATGKGLEWVSAIGTAGDTYYPGSVKGRFTISRENAKNSLYLRMNSLRAGDTAVYFCARADKNTAMFFDYWGQGTLVTVSS

SEQ ID NO: 203 - protein, 5 aa, Homo sapiens
  misc_feature: COV_2100
  misc_feature: Heavy CDR1
SYDMY

SEQ ID NO: 204 - protein, 16 aa, Homo sapiens
  misc_feature: COV_2100
  misc_feature: Heavy CDR2
AIGTAGDTYYPGSVKG

SEQ ID NO: 205 - protein, 11 aa, Homo sapiens
  misc_feature: COV_2100
  misc_feature: Heavy CDR3
ADKNTAMFFDY

SEQ ID NO: 206 - DNA, 324 bp, Homo sapiens
  CDS (1)..(324)
  misc_feature (1)..(324): COV_2100
gacatccagatgacccagtctccatcctccctgtctgcatctgtaggagacagagtcaccatcacttgccgggcaagtcagaacattaacaactttttacattggtatcagcagaaaccagggaatgcccctaaactcctgatctatgctgcatccactttgcaaagtggggtcccatcaaggttcagtggcagtggatctgggacagatttcactctcactataagcagtctgcaacctgaagattttgcaacttactactgtcaacagagttacagtacccccgggggcactttcggcggagggaccaaggtggagatcaaa

SEQ ID NO: 207 - protein, 108 aa, Homo sapiens
DIQMTQSPSSLSASVGDRVTITCRASQNINNFLHWYQQKPGNAPKLLIYAASTLQSGVPSRFSGSGSGTDFTLTISSLQPEDFATYYCQQSYSTPGGTFGGGTKVEIK

SEQ ID NO: 208 - protein, 11 aa, Homo sapiens
  misc_feature: COV_2100
  misc_feature: Light CDR1
RASQNINNFLH

SEQ ID NO: 209 - protein, 7 aa, Homo sapiens
  misc_feature: COV_2100
  misc_feature: Light CDR2
AASTLQS

SEQ ID NO: 210 - protein, 10 aa, Homo sapiens
  misc_feature: COV_2100
  misc_feature: Light CDR3
QQSYSTPGGT

SEQ ID NO: 211 - DNA, 384 bp, Homo sapiens
  CDS (1)..(384)
  misc_feature (1)..(384): COV_2103
gaggtgcagctggtggagtctgggggaggcgtggtccagcctgggaggtcgttgagactctcctgtggagcgtctggattcaccttcagcagctatggcatacactgggtccgccaggctccaggcaaggggctggattgggtggcagttatatggcatgatggaagccaaaaatattatggagactccgtgaagggccgattcaccatctccagagacaattccaagaacacgctctatctgcaaatgaacaggttgagagccgaggacacggctgtgtattactgtgcgagagattcgggtgatgactatgatagtagtggttatccgattgggaatgcttttgatctctggggccaagggacaatggtcaccgtctcttca

SEQ ID NO: 212 - protein, 128 aa, Homo sapiens
EVQLVESGGGVVQPGRSLRLSCGASGFTFSSYGIHWVRQAPGKGLDWVAVIWHDGSQKYYGDSVKGRFTISRDNSKNTLYLQMNRLRAEDTAVYYCARDSGDDYDSSGYPIGNAFDLWGQGTMVTVSS

SEQ ID NO: 213 - protein, 5 aa, Homo sapiens
  misc_feature: COV_2103
  misc_feature: Heavy CDR1
SYGIH

SEQ ID NO: 214 - protein, 17 aa, Homo sapiens
  misc_feature: COV-2103
  misc_feature: Heavy CDR2
VIWHDGSQKYYGDSVKG

SEQ ID NO: 215 - protein, 19 aa, Homo sapiens
  misc_feature: COV_2103
  misc_feature: Heavy CDR3
DSGDDYDSSGYPIGNAFDL

SEQ ID NO: 216 - DNA, 321 bp, Homo sapiens
  CDS (1)..(321)
  misc_feature (1)..(321): COV_2103
gacatccagatgacccagtctccttccaccctgtctgcatctgtaggagacagagtcaccatcacttgccgggccagtcagtttattaatagctggttggcctggtatcagcagaaaccagggaaagcccctaagctcctgatctataaggcatctagtttggaaactggggtcccatcaaggttcagcggcagtggatctgggacagaattcactctcaccatcagcagcctgcagcctgatgattttgcaacttattactgccaacagtataatacttattctttcactttcggccctgggaccaaagtagatatcaaa

SEQ ID NO: 217 - protein, 107 aa, Homo sapiens
DIQMTQSPSTLSASVGDRVTITCRASQFINSWLAWYQQKPGKAPKLLIYKASSLETGVPSRFSGSGSGTEFTLTISSLQPDDFATYYCQQYNTYSFTFGPGTKVDIK

SEQ ID NO: 218 - protein, 11 aa, Homo sapiens
  misc_feature: COV_2103
  misc_feature: Light CDR1
RASQFINSWLA

SEQ ID NO: 219 - protein, 7 aa, Homo sapiens
  misc_feature: COV_2103
  misc_feature: Light CDR2
KASSLET

SEQ ID NO: 220 - protein, 9 aa, Homo sapiens
  misc_feature: COV_2103
  misc_feature: Light CDR3
QQYNTYSFT

SEQ ID NO: 221 - DNA, 360 bp, Homo sapiens
  CDS (1)..(360)
  misc_feature (1)..(360): COV_2108
gaggtgcagctggttgagtctgggggaggcgtggtccagcctgggaggtccctgagactctcctgtgcagcctctggattcaccttcagtaactatgctttccactgggtccgccaggctccaggcaaggggctggagtgggtggctgtgatttcatatgatggaagcattaaatactccgcagactccgtgaagggccgattcaccatctccagagacaattccaagaacacgctgtatttgcaaatgaatagcctgagagctgaggacacggctgtgtattactgtgcgagagatagtggtgactacgtggactactttgactactggggccagggaaccctggtcaccgtctcctca

SEQ ID NO: 222 - protein, 120 aa, Homo sapiens
EVQLVESGGGVVQPGRSLRLSCAASGFTFSNYAFHWVRQAPGKGLEWVAVISYDGSIKYSADSVKGRFTISRDNSKNTLYLQMNSLRAEDTAVYYCARDSGDYVDYFDYWGQGTLVTVSS

SEQ ID NO: 223 - protein, 5 aa, Homo sapiens
  misc_feature: COV_2108
  misc_feature: Heavy CDR1
NYAFH

SEQ ID NO: 224 - protein, 17 aa, Homo sapiens
  misc_feature: COV_2108
  misc_feature: Heavy CDR2
VISYDGSIKYSADSVKG

SEQ ID NO: 225 - protein, 11 aa, Homo sapiens
  misc_feature: COV_2108
  misc_feature: Heavy CDR3
DSGDYVDYFDY

SEQ ID NO: 226 - DNA, 324 bp, Homo sapiens
  CDS (1)..(324)
  misc_feature (1)..(324): COV_2108
gacatccagatgacccagtctccatcctccctgtctgcatctgtaggagacagagtcaccatcacttgccgggcaagtcagagcattagcagctatttaaattggtatcagcagaaaccagggaaagcccctaagctcctgatccatactacatccagtttgcaaagtggggtcccatcaaggttcagtggcagtggatctgggacaggtttcactctcaccatcagcagtctgcaacctgaagattttgcaacttactactgtcaacagagttacagttcccctccgctcactttcggcggagggaccaaggtggagatcaaa

SEQ ID NO: 227 - protein, 108 aa, Homo sapiens
DIQMTQSPSSLSASVGDRVTITCRASQSISSYLNWYQQKPGKAPKLLIHTTSSLQSGVPSRFSGSGSGTGFTLTISSLQPEDFATYYCQQSYSSPPLTFGGGTKVEIK

SEQ ID NO: 228 - protein, 11 aa, Homo sapiens
  misc_feature: COV_2108
  misc_feature: Light CDR1
RASQSISSYLN

SEQ ID NO: 229 - protein, 7 aa, Homo sapiens
  misc_feature: COV_2108
  misc_feature: Light CDR2
TTSSLQS

SEQ ID NO: 230 - protein, 10 aa, Homo sapiens
  misc_feature: COV_2108
  misc_feature: Light CDR3
QQSYSSPPLT

SEQ ID NO: 231 - DNA, 381 bp, Homo sapiens
  CDS (1)..(381)
  misc_feature (1)..(381): COV_2123
gaggtgcagctggtggagtctgggggaggcgtggtccagcctgggaggtccctgagactctcctgtgcagcctctggattcaccttcagtagctatgctatgcactgggtccgccaggctccaggcaaggggctggagtgggtggcagttttatcatatgatggaagcaataaatataacgcagactccgtgaagggccgattcaccatctccagagacaattccaagaacacgctgtatctgcaaatgaacagcctgagagttgaggacacggctatgtattactgtgcgagagacggagtctcagttactatggttcggggagttattggcccactttgtgactactggggccagggaaccctggtcaccgtctcctca

SEQ ID NO: 232 - protein, 127 aa, Homo sapiens
EVQLVESGGGVVQPGRSLRLSCAASGFTFSSYAMHWVRQAPGKGLEWVAVLSYDGSNKYNADSVKGRFTISRDNSKNTLYLQMNSLRVEDTAMYYCARDGVSVTMVRGVIGPLCDYWGQGTLVTVSS

SEQ ID NO: 233 - protein, 5 aa, Homo sapiens
  misc_feature: COV_2123
  misc_feature: Heavy CDR1
SYAMH

SEQ ID NO: 234 - protein, 17 aa, Homo sapiens
  misc_feature: COV_2123
  misc_feature: Heavy CDR2
VLSYDGSNKYNADSVKG

SEQ ID NO: 235 - protein, 18 aa, Homo sapiens
  misc_feature: COV_2123
  misc_feature: Heavy CDR3
DGVSVTMVRGVIGPLCDY

SEQ ID NO: 236 - DNA, 321 bp, Homo sapiens
  CDS (1)..(321)
  misc_feature (1)..(321): COV_2123
gacatccagatgacccagtctccatcctccctgtctgcatctgtaggagacagagtcaccatcacttgccagacgagtcaggacattagcaactatttaaattggtatcagcagaaaccagggaaagcccctaagctcctgatctacgatgcatccaatttggaaacaggggtcccatcaaggttcagtggaagtggatctgggacagattttactttcaccatcagcagcctgcagcctgaggatattgcaacatattactgtcaacagtatgataatctccccctcactttcggcggagggaccaaggtggacatcaaa

SEQ ID NO: 237 - protein, 107 aa, Homo sapiens
DIQMTQSPSSLSASVGDRVTITCQTSQDISNYLNWYQQKPGKAPKLLIYDASNLETGVPSRFSGSGSGTDFTFTISSLQPEDIATYYCQQYDNLPLTFGGGTKVDIK

SEQ ID NO: 238 - protein, 11 aa, Homo sapiens
  misc_feature: COV_2123
  misc_feature: Light CDR1
QTSQDISNYLN

SEQ ID NO: 239 - protein, 7 aa, Homo sapiens
  misc_feature: COV_2123
  misc_feature: Light CDR2
DASNLET

SEQ ID NO: 240 - protein, 9 aa, Homo sapiens
  misc_feature: COV_2123
  misc_feature: Light CDR3
QQYDNLPLT

SEQ ID NO: 241 - DNA, 381 bp, Homo sapiens
  CDS (1)..(381)
  misc_feature (1)..(381): COV_2125
gaagtgcagctggtggagtctgggggaggcgtggtccagcctgggaggtccctgagactctcctgtgcagcctctggattcaccttcagtagttatggcatgcactgggtccgccaggctccaggcaaggggctggagtgggtggcagttatatcatatgatggaagtaataaatactatgcagactccgtgaagggccgattcaccatctccagagacaattccaagaacacgctgtctctgcaaatgaacagcctgagacctgaggacacggctgtgtattactgtgcgaaagacagcccctattattatgatagtagtggttactatccggggtacttccaggactggggccagggctccctggtcaccgtctcctca

SEQ ID NO: 242 - protein, 127 aa, Homo sapiens
EVQLVESGGGVVQPGRSLRLSCAASGFTFSSYGMHWVRQAPGKGLEWVAVISYDGSNKYYADSVKGRFTISRDNSKNTLSLQMNSLRPEDTAVYYCAKDSPYYYDSSGYYPGYFQDWGQGSLVTVSS

SEQ ID NO: 243 - protein, 5 aa, Homo sapiens
  misc_feature: COV_2125
  misc_feature: Heavy CDR1
SYGMH

SEQ ID NO: 244 - protein, 17 aa, Homo sapiens
  misc_feature: COV_2125
  misc_feature: Heavy CDR2
VISYDGSNKYYADSVKG

SEQ ID NO: 245 - protein, 18 aa, Homo sapiens
  misc_feature: COV_2125
  misc_feature: Heavy CDR3
DSPYYYDSSGYYPGYFQD

SEQ ID NO: 246 - DNA, 321 bp, Homo sapiens
  CDS (1)..(321)
  misc_feature (1)..(321): COV_2125
gacatccagatgacccagtctccatcctccctgtctgcatctataggggacagagtcaccatcacttgccgggcaagtcagaccattagcgactatttaaattggtatcagcagaaaccagggaaagcccctaacctcctgatctatgctgcatccacyytgcaaagtggggtcccatcaaggttcagtggcagtggatctgggacagatttcactctcaccatcagcagtctgcaacctgaagattttgcaacttactactgtcaacagagttacattacccctcggacgttcggccaagggaccaaggtggaaatcaaa

SEQ ID NO: 247 - protein, 107 aa, Homo sapiens
  misc_feature (53)..(53): The 'Xaa' at location 53 stands for Thr.
  misc_feature (54)..(54): The 'Xaa' at location 54 stands for Leu.
DIQMTQSPSSLSASIGDRVTITCRASQTISDYLNWYQQKPGKAPNLLIYAASXXQSGVPSRFSGSGSGTDFTLTISSLQPEDFATYYCQQSYITPRTFGQGTKVEIK

SEQ ID NO: 248 - protein, 11 aa, Homo sapiens
  misc_feature: COV_2125
  misc_feature: Light CDR1
RASQTISDYLN

SEQ ID NO: 249 - protein, 7 aa, Homo sapiens
  misc_feature: COV_2125
  misc_feature: Light CDR2
AASTLQS

SEQ ID NO: 250 - protein, 9 aa, Homo sapiens
  misc_feature: COV_2125
  misc_feature: Light CDR3
QQSYITPRT

SEQ ID NO: 251 - DNA, 384 bp, Homo sapiens
  CDS (1)..(384)
  misc_feature (1)..(384): COV_2134
gaggtgcagctggtggagtctgggggaggcgtggtccagcctgggaggtccctgagactctcctgtgcagcgtctggattcatcttcagtagctatggcatgtactgggtccgccaggctccaggcaaggggctggagtgggtggcagttatatggtatgatggaagtaataaatactatgcagactccgtgaagggccgattcaccatctccagagacaattccaagaacacgctgtatttgcaaatgaacagcctgagagccgaggacacggctgtgtattactgtgcgagagatctttcgagtagcagtggctgggacgattactactactactacggtatggacgtctggggccaagggaccacggtcaccgtctcctca

SEQ ID NO: 252 - protein, 128 aa, Homo sapiens
EVQLVESGGGVVQPGRSLRLSCAASGFIFSSYGMYWVRQAPGKGLEWVAVIWYDGSNKYYADSVKGRFTISRDNSKNTLYLQMNSLRAEDTAVYYCARDLSSSSGWDDYYYYYGMDVWGQGTTVTVSS

SEQ ID NO: 253 - protein, 5 aa, Homo sapiens
  misc_feature: COV_2134
  misc_feature: Heavy CDR1
SYGMY

SEQ ID NO: 254 - protein, 17 aa, Homo sapiens
  misc_feature: COV_2134
  misc_feature: Heavy CDR2
VIWYDGSNKYYADSVKG

SEQ ID NO: 255 - protein, 19 aa, Homo sapiens
  misc_feature: COV_2134
  misc_feature: Heavy CDR3
DLSSSSGWDDYYYYYGMDV

SEQ ID NO: 256 - DNA, 324 bp, Homo sapiens
  CDS (1)..(324)
  misc_feature (1)..(324): COV_2134
tcctatgagctgactcagccaccctcagtgtccgtgtccccaggacagacagccagcatcacctgctctggagataaattgggggataaatatgcttgctggtatcagcagaagccaggccagtcccctgtgctggtcatctatcaagatagcaagcggccctcagggatccctgagcgattctctggctccaactctgggaacacagccactctgaccatcagcgggacccaggctatggatgaggctgactattactgtcaggcgtgggacagcagcacttcctatgtggtattcggcggagggaccaagctgaccgtccta

SEQ ID NO: 257 - protein, 108 aa, Homo sapiens
SYELTQPPSVSVSPGQTASITCSGDKLGDKYACWYQQKPGQSPVLVIYQDSKRPSGIPERFSGSNSGNTATLTISGTQAMDEADYYCQAWDSSTSYVVFGGGTKLTVL

SEQ ID NO: 258 - protein, 11 aa, Homo sapiens
  misc_feature: COV_2134
  misc_feature: Light CDR1
SGDKLGDKYAC

SEQ ID NO: 259 - protein, 7 aa, Homo sapiens
  misc_feature: COV_2134
  misc_feature: Light CDR2
QDSKRPS

SEQ ID NO: 260 - protein, 11 aa, Homo sapiens
  misc_feature: COV_2134
  misc_feature: Light CDR3
QAWDSSTSYVV

SEQ ID NO: 261 - DNA, 360 bp, Homo sapiens
  CDS (1)..(360)
  misc_feature (1)..(360): COV_2151
caggtgcagctgcaggagtcgggcccacgactggtgaagccttcggagaccctgtccctcacctgcactgtctctggtggctccatcagcggtagtaattacttctggggctggatccgccagcccccagggaaggggctggagtggattgggactatctattatggtgggagcacctactacaacccgtccctcaagagtcgagtcaccatatcagtagacacgtccgagaaccaattctccctgaagctgagctctgtgaccgccgcggacacggccgtgtattactgtgcgaacttagcatggctgcgggggtactttgactactggggccagggaaccctggtcaccgtctcctca

SEQ ID NO: 262 - protein, 120 aa, Homo sapiens
QVQLQESGPRLVKPSETLSLTCTVSGGSISGSNYFWGWIRQPPGKGLEWIGTIYYGGSTYYNPSLKSRVTISVDTSENQFSLKLSSVTAADTAVYYCANLAWLRGYFDYWGQGTLVTVSS

SEQ ID NO: 263 - protein, 7 aa, Homo sapiens
  misc_feature: COV_2151
  misc_feature: Heavy CDR1
GSNYFWG

SEQ ID NO: 264 - protein, 16 aa, Homo sapiens
  misc_feature: COV_2151
  misc_feature: Heavy CDR2
TIYYGGSTYYNPSLKS

SEQ ID NO: 265 - protein, 10 aa, Homo sapiens
  misc_feature: COV_2151
  misc_feature: Heavy CDR3
LAWLRGYFDY

SEQ ID NO: 266 - DNA, 330 bp, Homo sapiens
  CDS (1)..(330)
  misc_feature (1)..(330): COV_2151
aattttatgctgactcagccccactctgtgtcggagtctccggggaagacggtgaccatctcctgcacccgcagcagtggcagcattgccagcaactatgtgcagtggtaccagcagcgcccgggcagtgcccccaccactgtgatctatgaggataaccaaagaccctctggggtccctgatcggttctctggctccatcgacagctcctccaactctgtctccctcaccatctctggactgaagactgaggacgaggctgactactactgtcagtcttatgatagcagcaattgggtgttcggcggagggaccaagctgaccgtccta

SEQ ID NO: 267 - protein, 110 aa, Homo sapiens
NFMLTQPHSVSESPGKTVTISCTRSSGSIASNYVQWYQQRPGSAPTTVIYEDNQRPSGVPDRFSGSIDSSSNSVSLTISGLKTEDEADYYCQSYDSSNWVFGGGTKLTVL

SEQ ID NO: 268 - protein, 13 aa, Homo sapiens
  misc_feature: COV_2151
  misc_feature: Light CDR1
TRSSGSIASNYVQ

SEQ ID NO: 269 - protein, 7 aa, Homo sapiens
  misc_feature: COV_2151
  misc_feature: Light CDR2
EDNQRPS

SEQ ID NO: 270 - protein, 9 aa, Homo sapiens
  misc_feature: COV_2151
  misc_feature: Light CDR3
QSYDSSNWV

SEQ ID NO: 271 - DNA, 381 bp, Homo sapiens
  CDS (1)..(381)
  misc_feature (1)..(381): COV_2165
gaggtgcagctggtggagtctgggggaggcttggtacagcctggggggtccctgagactctcctgtgcagcctctggattcaccttcagtagctatagcatgaactgggtccgccaggctccagggaaggggctggagtgggtttcatacattagtagtagtagtagcaccatatactacgcagactatgtgaagggccgattcaccatctccagagacaacgccaagaactcactgtatctgcaaatgaacagcctgagagccgaggacagggctgtgtattactgtgcgagagtggcgagacgcgatgtggcaccggctactatcgctgcgtacttccttgactactggggccagggaaccctggtcaccgtctcctca

SEQ ID NO: 272 - protein, 127 aa, Homo sapiens
EVQLVESGGGLVQPGGSLRLSCAASGFTFSSYSMNWVRQAPGKGLEWVSYISSSSSTIYYADYVKGRFTISRDNAKNSLYLQMNSLRAEDRAVYYCARVARRDVAPATIAAYFLDYWGQGTLVTVSS

SEQ ID NO: 273 - protein, 5 aa, Homo sapiens
  misc_feature: COV_2165
  misc_feature: Heavy CDR1
SYSMN

SEQ ID NO: 274 - protein, 17 aa, Homo sapiens
  misc_feature: COV_2165
  misc_feature: Heavy CDR2
YISSSSSTIYYADYVKG

SEQ ID NO: 275 - protein, 18 aa, Homo sapiens
  misc_feature: COV_2165
  misc_feature: Heavy CDR3
VARRDVAPATIAAYFLDY

SEQ ID NO: 276 - DNA, 327 bp, Homo sapiens
  CDS (1)..(327)
  misc_feature (1)..(327): COV_2165
gaaattgtgttgacacagtctccagccaccctgtctttgtctccaggggaaagagccaccctctcctgcagggccagtcagagtcttagcagctacttagcctggtaccaacagaaacctggccaggctcccaggctcctcatctatgatgcatccaccagggccactggcatcccagccaggttcagtggcagtgggtctgggacagacttcactctcaccatcagcagcctagagcctgaagattttgcagtttattactgtcagcaacgtagcacctggcctcgggggttcactttcggccctgggaccaaagtggatatcaaa

SEQ ID NO: 277 - protein, 109 aa, Homo sapiens
EIVLTQSPATLSLSPGERATLSCRASQSLSSYLAWYQQKPGQAPRLLIYDASTRATGIPARFSGSGSGTDFTLTISSLEPEDFAVYYCQQRSTWPRGFTFGPGTKVDIK

SEQ ID NO: 278 - protein, 11 aa, Homo sapiens
  misc_feature: COV-2165
  misc_feature: Light CDR1
RASQSLSSYLA

SEQ ID NO: 279 - protein, 7 aa, Homo sapiens
  misc_feature: COV-2165
  misc_feature: Light CDR2
DASTRAT

SEQ ID NO: 280 - protein, 11 aa, Homo sapiens
  misc_feature: COV-2165
  misc_feature: Light CDR3
QQRSTWPRGFT

SEQ ID NO: 281 - DNA, 393 bp, Homo sapiens
  CDS (1)..(393)
  misc_feature (1)..(393): COV_2173
caggtgcagctgcaggagtcgggcccaggactggtaaagccttcggagaccctgtccctcacctgcagtgtctctggtgactccatcagtagtagtgattactcctggggctggatccgccagcccccagggaagggactggagtggattgggactatctattatattaagaacacctactacaacccgtccctcaggagtcgagtcaccctatcagtagacacgtccaagaaccttttctccctgaagctgagctctgtgaccgccgcggacacggccgtgtattactgtgcgagagaaaggcccccttttgatgttgtagtagtaccagctgctcgaccgtacaactggttcgacccctggggcctgggaaccctggtcatcgtctcctca

SEQ ID NO: 282 - protein, 131 aa, Homo sapiens
QVQLQESGPGLVKPSETLSLTCSVSGDSISSSDYSWGWIRQPPGKGLEWIGTIYYIKNTYYNPSLRSRVTLSVDTSKNLFSLKLSSVTAADTAVYYCARERPPFDVVVVPAARPYNWFDPWGLGTLVIVSS

SEQ ID NO: 283 - protein, 7 aa, Homo sapiens
  misc_feature: COV_2173
  misc_feature: Heavy CDR1
SSDYSWG

SEQ ID NO: 284 - protein, 16 aa, Homo sapiens
  misc_feature: COV_2173
  misc_feature: Heavy CDR2
TIYYIKNTYYNPSLRS

SEQ ID NO: 285 - protein, 21 aa, Homo sapiens
  misc_feature: COV_2173
  misc_feature: Heavy CDR3
ERPPFDVVVVPAARPYNWFDP

SEQ ID NO: 286 - DNA, 336 bp, Homo sapiens
  CDS (1)..(336)
  misc_feature (1)..(336): COV_2173
cagtctgtcctgatgcagccgccctcagtgtctggggccccagggcagagggtcaccatctcctgcactgggagcagctccaacatcggggcaggttatgatgtccactggtaccagcaacttccaggaacagcccccaaactcctcatctatggtaacaacaatcggccctcaggggtccctgaccgattctctggctccaagtctggcacctcagcctccctggccatcactgggctccaggctgacgatgaggctgattattactgccagtcctatgacagcagcctgagtggttcgaaggtattcggcggagggaccaagctgaccgtcctt

SEQ ID NO: 287 - protein, 112 aa, Homo sapiens
QSVLMQPPSVSGAPGQRVTISCTGSSSNIGAGYDVHWYQQLPGTAPKLLIYGNNNRPSGVPDRFSGSKSGTSASLAITGLQADDEADYYCQSYDSSLSGSKVFGGGTKLTVL

SEQ ID NO: 288 - protein, 14 aa, Homo sapiens
  misc_feature: COV_2173
  misc_feature: Light CDR1
TGSSSNIGAGYDVH

SEQ ID NO: 289 - protein, 7 aa, Homo sapiens
  misc_feature: COV_2173
  misc_feature: Light CDR2
GNNNRPS

SEQ ID NO: 290 - protein, 12 aa, Homo sapiens
  misc_feature: COV_2173
  misc_feature: Light CDR3
QSYDSSLSGSKV

SEQ ID NO: 291 - DNA, 348 bp, Homo sapiens
  CDS (1)..(348)
  misc_feature (1)..(348): COV_2193
caggtgcagttggtacagtctggggctgaggtgaagaagcctggggcctcagtgaaggtctcctgcaaggtttccggatacaccctcactgacttatccatgcactgggtgcgacagactcctggaaaagggcttgagtggatggggggttttgatgctgaagatggcgaaacaatctatgcacagaacttccagggcagagtcaccatgaccgaggacacatctatagacgtagcctacatggagctgagcagcctgagatctgaggacacggccgtgtattattgtgcaacaggtagcgtagggcctgactactggggccagggaaccctggtcaccgtctcctca

SEQ ID NO: 292 - protein, 116 aa, Homo sapiens
QVQLVQSGAEVKKPGASVKVSCKVSGYTLTDLSMHWVRQTPGKGLEWMGGFDAEDGETIYAQNFQGRVTMTEDTSIDVAYMELSSLRSEDTAVYYCATGSVGPDYWGQGTLVTVSS

SEQ ID NO: 293 - protein, 5 aa, Homo sapiens
  misc_feature: COV_2193
  misc_feature: Heavy CDR1
DLSMH

SEQ ID NO: 294 - protein, 17 aa, Homo sapiens
  misc_feature: COV_2193
  misc_feature: Heavy CDR2
GFDAEDGETIYAQNFQG

SEQ ID NO: 295 - protein, 7 aa, Homo sapiens
  misc_feature: COV_2193
  misc_feature: Heavy CDR3
GSVGPDY

SEQ ID NO: 296 - DNA, 324 bp, Homo sapiens
  CDS (1)..(324)
  misc_feature (1)..(324): COV_2193
tcttctgagctgactcaggaccctgctgtgtctgtggccttgggacagacagtcaggatcacatgccagggagacagcctcagaagttattatgcaagctggtttcagcagaagccaggacaggcccctgtacttgtcatctatcttaaaaacgaccggccctcagggatcccagaccgattctctggctccagctcaggaaacacagcttccttgaccatcactggggctcaggcggaagatgaggctgactattactgtaactcccgggacagcagtggtaaccatcaggtgttcggcggagggaccaagctgactgtccta

SEQ ID NO: 297 - protein, 108 aa, Homo sapiens
SSELTQDPAVSVALGQTVRITCQGDSLRSYYASWFQQKPGQAPVLVIYLKNDRPSGIPDRFSGSSSGNTASLTITGAQAEDEADYYCNSRDSSGNHQVFGGGTKLTVL

SEQ ID NO: 298 - protein, 11 aa, Homo sapiens
  misc_feature: COV_2193
  misc_feature: Light CDR1
QGDSLRSYYAS

SEQ ID NO: 299 - protein, 7 aa, Homo sapiens
  misc_feature: COV_2193
  misc_feature: Light CDR2
LKNDRPS

SEQ ID NO: 300 - protein, 11 aa, Homo sapiens
  misc_feature: COV_2193
  misc_feature: Light CDR3
NSRDSSGNHQV

SEQ ID NO: 301 - DNA, 366 bp, Homo sapiens
  CDS (1)..(366)
  misc_feature (1)..(366): COV_2196
caggtgcagctggtacagtctggggctgaggtgaagaagcctggggcctcagtgaaggtctcctgcaaggtttccggatacaccctcattgaattatccatgcactgggtgcgacaggctcctggaaaagggcttgagtggatgggaggttttgatcctgaagatgctaaaacaatctacgcacagaagttccagggcagagtcaccatgaccgaggacacatctacagacacagcctacatggagctgagcagcctgacatttgaggacacggccgtgtattactgtgcaacaacacccgcgtttatggcagcggctggcgactttgactactggggccagggaaccctggtcaccgtctcctca

SEQ ID NO: 302 - protein, 122 aa, Homo sapiens
QVQLVQSGAEVKKPGASVKVSCKVSGYTLIELSMHWVRQAPGKGLEWMGGFDPEDAKTIYAQKFQGRVTMTEDTSTDTAYMELSSLTFEDTAVYYCATTPAFMAAAGDFDYWGQGTLVTVSS

SEQ ID NO: 303 - protein, 5 aa, Homo sapiens
  misc_feature: COV_2196
  misc_feature: Heavy CDR1
ELSMH

SEQ ID NO: 304 - protein, 17 aa, Homo sapiens
  misc_feature: COV_2195
  misc_feature: Heavy CDR2
GFDPEDAKTIYAQKFQG

SEQ ID NO: 305 - protein, 13 aa, Homo sapiens
  misc_feature: COV_2196
  misc_feature: Heavy CDR3
TPAFMAAAGDFDY

SEQ ID NO: 306 - DNA, 312 bp, Homo sapiens
  CDS (1)..(312)
  misc_feature (1)..(312): COV_2196
cagcctgtgctgactcagccatcctcagtgtcggtgtctccgggacagacagccacaatcacctgctcaggagatgtactggcaaaaaagtatgctcggtggttccagcagaagccaggccaggcccctatgttggtgatttataaagacactgagcggccctcagggatccctgagcgattctccggctccagctcagggaccacagtcaccttgaccatcaacggggcccaggttgaggatgaggctgactattactgttactctgcggctgcctgggtattcggcggcgggaccaagctgaccgtccta

SEQ ID NO: 307 - protein, 104 aa, Homo sapiens
QPVLTQPSSVSVSPGQTATITCSGDVLAKKYARWFQQKPGQAPMLVIYKDTERPSGIPERFSGSSSGTTVTLTINGAQVEDEADYYCYSAAAWVFGGGTKLTVL

SEQ ID NO: 308 - protein, 11 aa, Homo sapiens
  misc_feature: COV_2196
  misc_feature: Light CDR1
SGDVLAKKYAR

SEQ ID NO: 309 - protein, 7 aa, Homo sapiens
  misc_feature: COV_2196
  misc_feature: Light CDR2
KDTERPS

SEQ ID NO: 310 - protein, 7 aa, Homo sapiens
  misc_feature: COV_2196
  misc_feature: Light CDR3
YSAAAWV

SEQ ID NO: 311 - DNA, 372 bp, Homo sapiens
  CDS (1)..(372)
  misc_feature (1)..(372): COV_3000
gaggtgcagctggtagagtctgggggaggcttggtacagccagggcggtccctgagactctcttgtacagcttctggattcaactttggtgataattctatgagctgggtccgccaggctccagggaaggggctggagtgggtaggcttcatttcaaacagagcttctggtgggacaactgagtacgccgcgtctgtgaaaggcagattcaccatctcaagagatgattccaaaagcatcgcctatctgcagatgaacagcctgaaaaccgaggacacagccatgtacttctgtactaaagattcatatggtcattttcccaattatggttttgatatctggggccaagggacaatggtcaccgtctcttca

SEQ ID NO: 312 - protein, 124 aa, Homo sapiens
EVQLVESGGGLVQPGRSLRLSCTASGFNFGDNSMSWVRQAPGKGLEWVGFISNRASGGTTEYAASVKGRFTISRDDSKSIAYLQMNSLKTEDTAMYFCTKDSYGHFPNYGFDIWGQGTMVTVSS

SEQ ID NO: 313 - protein, 5 aa, Homo sapiens
  misc_feature: COV_3000
  misc_feature: Heavy CDR1
DNSMS

SEQ ID NO: 314 - protein, 19 aa, Homo sapiens
  misc_feature: COV_3000
  misc_feature: Heavy CDR2
FISNRASGGTTEYAASVKG

SEQ ID NO: 315 - protein, 13 aa, Homo sapiens
  misc_feature: COV_3000
  misc_feature: Heavy CDR3
DSYGHFPNYGFDI

SEQ ID NO: 316 - DNA, 336 bp, Homo sapiens
  CDS (1)..(336)
  misc_feature (1)..(336): COV_3000
gctgttgtgatgacacagactcccctctctctgtccgtcacccctggacagccggcctccatctcctgcaagtctagtcagagcctcatacatactgatggaaagacctatcattattggttcctgcagaggccaggccagcctccacaactcctgatttatgatgtttccaatagggtctctggagtgccagataggttcagtggcagcgggtcagggacagatttcacactgaaaatcagccgggtggaggctgacgatgttggggtttattactgcatgcacagtatacagcttcctcgggcgttcggccaagggaccaaggtggaaatcaca

SEQ ID NO: 317 - protein, 112 aa, Homo sapiens
AVVMTQTPLSLSVTPGQPASISCKSSQSLIHTDGKTYHYWFLQRPGQPPQLLIYDVSNRVSGVPDRFSGSGSGTDFTLKISRVEADDVGVYYCMHSIQLPRAFGQGTKVEIT

SEQ ID NO: 318 - protein, 16 aa, Homo sapiens
  misc_feature: COV_3000
  misc_feature: Light CDR1
KSSQSLIHTDGKTYHY

SEQ ID NO: 319 - protein, 7 aa, Homo sapiens
  misc_feature: COV_3000
  misc_feature: Light CDR2
DVSNRVS

SEQ ID NO: 320 - protein, 9 aa, Homo sapiens
  misc_feature: COV_3000
  misc_feature: Light CDR3
MHSIQLPRA

SEQ ID NO: 321 - DNA, 366 bp, Homo sapiens
  CDS (1)..(366)
  misc_feature (1)..(366): COV_3005
gaggtgcagctactgggattcggggggggcttcatccggccgggggggtccctgagactctcgtgtgcagcatcaggatttagctttagcagttattccatgagttgggtccgccagggtcccgggaatggactggagtgggtcgcaggtattagtgataggggtaatagtaagacctacgcagactccgtgaagggccggttcaccgtctctagagacaattccaaggacatgctttatctggaattgaccaacctcagagtcgaggactcggccacatatttctgtgcgagagattggtctcagagcagttcgtcgtcttcccctgattattggggcccgggaatcctggtcaccgtctcctca

SEQ ID NO: 322 - protein, 122 aa, Homo sapiens
EVQLLGFGGGFIRPGGSLRLSCAASGFSFSSYSMSWVRQGPGNGLEWVAGISDRGNSKTYADSVKGRFTVSRDNSKDMLYLELTNLRVEDSATYFCARDWSQSSSSSSPDYWGPGILVTVSS

SEQ ID NO: 323 - protein, 5 aa, Homo sapiens
  misc_feature: COV_3005
  misc_feature: Heavy CDR1
SYSMS

SEQ ID NO: 324 - protein, 17 aa, Homo sapiens
  misc_feature: COV_3005
  misc_feature: Heavy CDR2
GISDRGNSKTYADSVKG

SEQ ID NO: 325 - protein, 13 aa, Homo sapiens
  misc_feature: COV_3005
  misc_feature: Heavy CDR3
DWSQSSSSSSPDY

SEQ ID NO: 326 - DNA, 321 bp, Homo sapiens
  CDS (1)..(321)
  misc_feature (1)..(321): COV_3005
gacatccagatgacccagtctccatctgccatgtctgcttttgttggagacagagtcaccatcacttgtcgggcgagtctgggcgtaaataattacttagcctggtatcagcagagacccgggaaagtccccaggcgcctgatttatgctgcgtccagtttgcagagtggggtcccatcaagattccgcggcagcggatctgggacacaattcactctcacaatcaccggtctgcagcctgaagattctggaacttattactgtctgcaacatggtcgttaccctccagtgttcggcccagggaccagggtggaactcatt

SEQ ID NO: 327 - protein, 107 aa, Homo sapiens
DIQMTQSPSAMSAFVGDRVTITCRASLGVNNYLAWYQQRPGKVPRRLIYAASSLQSGVPSRFRGSGSGTQFTLTITGLQPEDSGTYYCLQHGRYPPVFGPGTRVELI

SEQ ID NO: 328 - protein, 11 aa, Homo sapiens
  misc_feature: COV_3005
  misc_feature: Light CDR1
RASLGVNNYLA

SEQ ID NO: 329 - protein, 7 aa, Homo sapiens
  misc_feature: COV_3005
  misc_feature: Light CDR2
AASSLQS

SEQ ID NO: 330 - protein, 9 aa, Homo sapiens
  misc_feature: COV_3005
  misc_feature: Light CDR3
LQHGRYPPV

SEQ ID NO: 331 - DNA, 372 bp, Homo sapiens
  CDS (1)..(372)
  misc_feature (1)..(372): COV_3013
gaggtgcagctggtagagtctgggggaggcttggtacagccagggcggtccctgagactctcctgtacaacttctggattcaactttggtgataactctatgagctgggtccgccaggctccagggaaggggctggagtgggtaggcttcatttcaaacaaagctcatggtgcgacaacagagtatgccgcgtctgtgagaggcagattcaccatctcaagagatgattccaaaagcatcgtctatctgcagatgaacagcctgacaaccgaagacacagccatgtactactgtattagagattcatatgggcattttcccagctatggttttgatatctggggccaagggacaatggtcaccgtctcctca

SEQ ID NO: 332 - protein, 124 aa, Homo sapiens
EVQLVESGGGLVQPGRSLRLSCTTSGFNFGDNSMSWVRQAPGKGLEWVGFISNKAHGATTEYAASVRGRFTISRDDSKSIVYLQMNSLTTEDTAMYYCIRDSYGHFPSYGFDIWGQGTMVTVSS

SEQ ID NO: 333 - protein, 5 aa, Homo sapiens
  misc_feature: COV_3013
  misc_feature: Heavy CDR1
DNSMS

SEQ ID NO: 334 - protein, 19 aa, Homo sapiens
  misc_feature: COV_3013
  misc_feature: Heavy CDR2
FISNKAHGATTEYAASVRG

SEQ ID NO: 335 - protein, 13 aa, Homo sapiens
  misc_feature: COV_3013
  misc_feature: Heavy CDR3
DSYGHFPSYGFDI

SEQ ID NO: 336 - DNA, 336 bp, Homo sapiens
  CDS (1)..(336)
  misc_feature (1)..(336): COV_3013
gatgttgtgatgacacagactcccctctctctgtccgtcacccctggacagccggcctccatctcctgcaagtctagtcagagcctcatacatagtgatgcaaagacctatttttattggttcctgcagaagccaggccagcctcctcaactcctgatctatgatgtttccaataggttctctggagtgccagataggttcagtggcagcgggtcagggacagatttcacactgaaaatcagccgggtggaggctgaggatgttggggtttattactgcatgcacagtatacagcttcctcggacgttcggccaagggaccaaggtggaaatcaca

SEQ ID NO: 337 - protein, 112 aa, Homo sapiens
DVVMTQTPLSLSVTPGQPASISCKSSQSLIHSDAKTYFYWFLQKPGQPPQLLIYDVSNRFSGVPDRFSGSGSGTDFTLKISRVEAEDVGVYYCMHSIQLPRTFGQGTKVEIT

SEQ ID NO: 338 - protein, 16 aa, Homo sapiens
  misc_feature: COV_3013
  misc_feature: Light CDR1
KSSQSLIHSDAKTYFY

SEQ ID NO: 339 - protein, 7 aa, Homo sapiens
  misc_feature: COV_3013
  misc_feature: Light CDR2
DVSNRFS

SEQ ID NO: 340 - protein, 9 aa, Homo sapiens
  misc_feature: COV_3013
  misc_feature: Light CDR3
MHSIQLPRT

SEQ ID NO: 341 - DNA, 372 bp, Homo sapiens
  CDS (1)..(372)
  misc_feature (1)..(372): COV_3019
gaggtgcagctggtggagtctgggggaggcttggtacagccagggcaatccctgagactctcctgcacaacttctggattcaactttggtgataattctatgagctgggtccgccaggctccagggaaggggctggagtgggtcggcttcatttcacctaaatctcatggtgagacaacagaatacgccgcgtctgtgaaaggcagattcagcatttcaagagatgattccacaagcatcgcctatctgcagatgagcagcctgaaaaccgaggacacagccatctactactgtattagagattcatatggacactttcccgagtatggttttgatatctggggccaagggacaatggtcaccgtctcttca

SEQ ID NO: 342 - protein, 124 aa, Homo sapiens
EVQLVESGGGLVQPGQSLRLSCTTSGFNFGDNSMSWVRQAPGKGLEWVGFISPKSHGETTEYAASVKGRFSISRDDSTSIAYLQMSSLKTEDTAIYYCIRDSYGHFPEYGFDIWGQGTMVTVSS

SEQ ID NO: 343 - protein, 5 aa, Homo sapiens
  misc_feature: COV_3019
  misc_feature: Heavy CDR1
DNSMS

SEQ ID NO: 344 - protein, 19 aa, Homo sapiens
  misc_feature: COV_3019
  misc_feature: Heavy CDR2
FISPKSHGETTEYAASVKG

SEQ ID NO: 345 - protein, 13 aa, Homo sapiens
  misc_feature: COV_3019
  misc_feature: Heavy CDR3
DSYGHFPEYGFDI

SEQ ID NO: 346 - DNA, 336 bp, Homo sapiens
  CDS (1)..(336)
  misc_feature (1)..(336): COV_3019
gatgttgtgctgacacagactcccctctttctgtccgtcacccctgggcagccggcctccatctcctgcaagtctagtcggagcctcatacatagtgatggaaagacctatttttattggttcctgcagaaggcaggccagcctccacaactcctgatctatgaagcttccaataggttctctggcgtgccggataggttcagcggcagcgggtcagggacagatttcacactgcatatcagccgggtagaggctgaagatgtcgggatttattactgcatgcacagtatacagcttcctcggacgttcggccaagggaccaaggtggaactcaca

SEQ ID NO: 347 - protein, 112 aa, Homo sapiens
DVVLTQTPLFLSVTPGQPASISCKSSRSLIHSDGKTYFYWFLQKAGQPPQLLIYEASNRFSGVPDRFSGSGSGTDFTLHISRVEAEDVGIYYCMHSIQLPRTFGQGTKVELT

SEQ ID NO: 348 - protein, 16 aa, Homo sapiens
  misc_feature: COV_3019
  misc_feature: Light CDR1
KSSRSLIHSDGKTYFY

SEQ ID NO: 349 - protein, 7 aa, Homo sapiens
  misc_feature: COV_3019
  misc_feature: Light CDR2
EASNRFS

SEQ ID NO: 350 - protein, 9 aa, Homo sapiens
  misc_feature: COV_3019
  misc_feature: Light CDR3
MHSIQLPRT

SEQ ID NO: 351 - DNA, 372 bp, Homo sapiens
  CDS (1)..(372)
  misc_feature (1)..(372): COV_3028
gaggtgcagctggtggagtctgggggaggcttggtacagccagggcaatccctgagactctcctgcacaacttctggattcaactttggtgataattctatgagctgggtccgccaggctccagggaaggggctggagtgggtcggcttcatttcacctaaatctcatggtgggacaacagagtacgccgcgtctgtgaaaggcagattcagtatctcaagagatgattccacaagcaacgcctatctgcagatgaccagcctgaaaaccgaggacacagccatctactactgtattagagattcatatggacactttcccgagtatggttttgatatctggggccaagggacaatggtcaccgtctcttca

SEQ ID NO: 352 - protein, 124 aa, Homo sapiens
EVQLVESGGGLVQPGQSLRLSCTTSGFNFGDNSMSWVRQAPGKGLEWVGFISPKSHGGTTEYAASVKGRFSISRDDSTSNAYLQMTSLKTEDTAIYYCIRDSYGHFPEYGFDIWGQGTMVTVSS

SEQ ID NO: 353 - protein, 5 aa, Homo sapiens
  misc_feature: COV_3028
  misc_feature: Heavy CDR1
DNSMS

SEQ ID NO: 354 - protein, 19 aa, Homo sapiens
  misc_feature: COV_3028
  misc_feature: Heavy CDR2
FISPKSHGGTTEYAASVKG

SEQ ID NO: 355 - protein, 13 aa, Homo sapiens
  misc_feature: COV_3028
  misc_feature: Heavy CDR3
DSYGHFPEYGFDI

SEQ ID NO: 356 - DNA, 336 bp, Homo sapiens
  CDS (1)..(336)
  misc_feature (1)..(336): COV_3028
gatgttgtgctgacacagactcccctctttctgtccgtcacccctgggcagccggcttccatttcctgcaagtctagtgggagcctcatacatactgatggaaagacctatttttattggttcctgcagaaggcagggcagcctccacaactcctgatctatgaagcttccaataggttctctggcgtgccggataggttcagcggcagcgggtcagggacagatttcacactgcatatcagccgggtagaggctgaagatgtcgggatttattactgcatgcacagtatacagcttcctcggacgttcggccaagggaccaaggtggaactcaca

SEQ ID NO: 357 - protein, 112 aa, Homo sapiens
DVVLTQTPLFLSVTPGQPASISCKSSGSLIHTDGKTYFYWFLQKAGQPPQLLIYEASNRFSGVPDRFSGSGSGTDFTLHISRVEAEDVGIYYCMHSIQLPRTFGQGTKVELT

SEQ ID NO: 358 - protein, 16 aa, Homo sapiens
  misc_feature: COV_3028
  misc_feature: Light CDR1
KSSGSLIHTDGKTYFY

SEQ ID NO: 359 - protein, 7 aa, Homo sapiens
  misc_feature: COV_3028
  misc_feature: Light CDR2
EASNRFS

SEQ ID NO: 360 - protein, 9 aa, Homo sapiens
  misc_feature: COV_3028
  misc_feature: Light CDR3
MHSIQLPRT

SEQ ID NO: 361 - DNA, 372 bp, Homo sapiens
  CDS (1)..(372)
  misc_feature (1)..(372): COV_3031
gaggtgcagctggtggagtctgggggaggcttggtacagccagggcggtccctgagactctcctgcacaacttctggattcaactttggtgataattctatgagttgggtccgccaggctccagggaaggggctggagtgggtaggcttcatttcaaataaagcttatggtgggacaacagaatacgccgcgtctgtgaaaggcagattcaccatctcaagagatgattccacaagcatcgcctatctgcagatgaacagcctgaaaaccgaggacacagccatatactactgtattagagattcatatggacattttcccgattatggttttgatatctggggccaagggacaatggtcaccgtctcttca

SEQ ID NO: 362 - protein, 124 aa, Homo sapiens
EVQLVESGGGLVQPGRSLRLSCTTSGFNFGDNSMSWVRQAPGKGLEWVGFISNKAYGGTTEYAASVKGRFTISRDDSTSIAYLQMNSLKTEDTAIYYCIRDSYGHFPDYGFDIWGQGTMVTVSS

SEQ ID NO: 363 - protein, 5 aa, Homo sapiens
  misc_feature: COV_3031
  misc_feature: Heavy CDR1
DNSMS

SEQ ID NO: 364 - protein, 19 aa, Homo sapiens
  misc_feature: COV_3031
  misc_feature: Heavy CDR2
FISNKAYGGTTEYAASVKG

SEQ ID NO: 365 - protein, 13 aa, Homo sapiens
  misc_feature: COV_3031
  misc_feature: Heavy CDR3
DSYGHFPDYGFDI

SEQ ID NO: 366 - DNA, 336 bp, Homo sapiens
  CDS (1)..(336)
  misc_feature (1)..(336): COV_3031
gatgttgtgctgacacagactcccctctttctgtccgtcacccctggacagccggcttccatttcctgcaagtctagtcggagcctcatacatagtgatggaaagacctatttttattggttcctgcagaagccaggccagcctccacaactcctgatctatgaagcttccaataggttctctggagtgccagataggttcagcggcagcgggtcagggacagatttcacactgaaaatcagccgggtggaggctgaagatgtcggggtttattactgcatgcacagtatacagcttcctcggacgttcggccaagggaccaaggtggaaatcaca

SEQ ID NO: 367 - protein, 112 aa, Homo sapiens
DVVLTQTPLFLSVTPGQPASISCKSSRSLIHSDGKTYFYWFLQKPGQPPQLLIYEASNRFSGVPDRFSGSGSGTDFTLKISRVEAEDVGVYYCMHSIQLPRTFGQGTKVEIT

SEQ ID NO: 368 - protein, 16 aa, Homo sapiens
  misc_feature: COV_3031
  misc_feature: Light CDR1
KSSRSLIHSDGKTYFY

SEQ ID NO: 369 - protein, 7 aa, Homo sapiens
  misc_feature: COV_3031
  misc_feature: Light CDR2
EASNRFS

SEQ ID NO: 370 - protein, 9 aa, Homo sapiens
  misc_feature: COV_3031
  misc_feature: Light CDR3
MHSIQLPRT

SEQ ID NO: 371 - DNA, 372 bp, Homo sapiens
  CDS (1)..(372)
  misc_feature (1)..(372): COV_3033
gaggtgcagatggtggaatctgggggaggtttcgtccagccagggcagtccccgagactctcctgtttagtctctggactcaactttgctgattatgccttctgttgggtccgccaggctccagggaaggggccggaatggataggcttcattagctctaaacttcatggtgggacaacacactacgccgcgtctgtggaaggccgattcatcatctcaagagatgattccaaaaacgtcgtctatctacaaatggacaacctgaaagccgaggactcagccgtctactattgtaccagagattcatatgggtattttcccgaatatggttttggtgtctggggccaagggacactagtcaccgtctcttcc

SEQ ID NO: 372 - protein, 124 aa, Homo sapiens
EVQMVESGGGFVQPGQSPRLSCLVSGLNFADYAFCWVRQAPGKGPEWIGFISSKLHGGTTHYAASVEGRFIISRDDSKNVVYLQMDNLKAEDSAVYYCTRDSYGYFPEYGFGVWGQGTLVTVSS

SEQ ID NO: 373 - protein, 5 aa, Homo sapiens
  misc_feature: COV_3033
  misc_feature: Heavy CDR1
DYAFC

SEQ ID NO: 374 - protein, 19 aa, Homo sapiens
  misc_feature: COV_3033
  misc_feature: Heavy CDR2
FISSKLHGGTTHYAASVEG

SEQ ID NO: 375 - protein, 13 aa, Homo sapiens
  misc_feature: COV_3033
  misc_feature: Heavy CDR3
DSYGYFPEYGFGV

SEQ ID NO: 376 - DNA, 336 bp, Homo sapiens
  misc_feature (1)..(336): COV_3033
  CDS (1)..(336)
gaagttgtgctgacccagactccactttctctgtccgtcacccctggacagccggcctccatctcctgcaggtctagtcagagcctcgtacatagtgatgggaggacctatctgtattggttcctgcagaagccaggccagcctccacagcccctgatttatgacatttccagtcggttctctggagtgccatataggttcactggctccgggtcagggacatatttcacactgagaatcagccgggtggaggctgacgatgttggcgtttattattgcatgcacagcatacaacttcctcgggcgttcggccaagggaccaaagtggaaatcaaa

SEQ ID NO: 377 - protein, 112 aa, Homo sapiens
EVVLTQTPLSLSVTPGQPASISCRSSQSLVHSDGRTYLYWFLQKPGQPPQPLIYDISSRFSGVPYRFTGSGSGTYFTLRISRVEADDVGVYYCMHSIQLPRAFGQGTKVEIK

SEQ ID NO: 378 - protein, 16 aa, Homo sapiens
  misc_feature: COV_3033
  misc_feature: Light CDR1
RSSQSLVHSDGRTYLY

SEQ ID NO: 379 - protein, 7 aa, Homo sapiens
  misc_feature: COV_3033
  misc_feature: Light CDR2
DISSRFS

SEQ ID NO: 380 - protein, 9 aa, Homo sapiens
  misc_feature: COV_3033
  misc_feature: Light CDR3
MHSIQLPRA

SEQ ID NO: 381 - DNA, 372 bp, Homo sapiens
  CDS (1)..(372)
  misc_feature (1)..(372): COV_3037
gaggtgcagctggtagagtctgggggaggcttggtacagccagggcggtccctgagactctcctgtacagcttctggattcaactttggtgataattctatgagttgggtccgccaggctccagggaaggggctggagtgggtaggcttcatttcaaacagagcttatggtgggacaactgagtacgccgcgtctgtgaaaggcagattcagcatctcaagagatgattccaaaagcatcgcctatctgcagatgaacagcctgagaaccgaggacacagccatgtacttctgtactaaagattcatatggtcattttcccaattatggttttgatatctggggccaagggacaatggtcatcgtctcttca

SEQ ID NO: 382 - protein, 124 aa, Homo sapiens
EVQLVESGGGLVQPGRSLRLSCTASGFNFGDNSMSWVRQAPGKGLEWVGFISNRAYGGTTEYAASVKGRFSISRDDSKSIAYLQMNSLRTEDTAMYFCTKDSYGHFPNYGFDIWGQGTMVIVSS

SEQ ID NO: 383 - protein, 5 aa, Homo sapiens
  misc_feature: COV_3037
  misc_feature: Heavy CDR1
DNSMS

SEQ ID NO: 384 - protein, 19 aa, Homo sapiens
  misc_feature: COV_3037
  misc_feature: Heavy CDR2
FISNRAYGGTTEYAASVKG

SEQ ID NO: 385 - protein, 13 aa, Homo sapiens
  misc_feature: COV_3037
  misc_feature: Heavy CDR3
DSYGHFPNYGFDI

SEQ ID NO: 386 - DNA, 336 bp, Homo sapiens
  misc_feature: COV_3037
  CDS (1)..(336)
gttgttgtgatgacacagactcccctctctctgtccgtcacccctggacagccggcttccatctcctgcaagtctagtcagagcctcatacatactgatggaaagacctatcattattggttcctccagaggccaggccagcctccacaactcctcatttatgatgtttccaatagggtctctggagtgccagataggttcagtggcagcgggtcagggacagatttcacactgaaaatcagccgggtggaggctgacgatgttggggtttattactgcatgcacagtatacagcttcctcgggcgttcggccaagggaccaaggtggaaatcaca

SEQ ID NO: 387 - protein, 112 aa, Homo sapiens
VVVMTQTPLSLSVTPGQPASISCKSSQSLIHTDGKTYHYWFLQRPGQPPQLLIYDVSNRVSGVPDRFSGSGSGTDFTLKISRVEADDVGVYYCMHSIQLPRAFGQGTKVEIT

SEQ ID NO: 388 - protein, 16 aa, Homo sapiens
  misc_feature: COV_3037
  misc_feature: Light CDR1
KSSQSLIHTDGKTYHY

SEQ ID NO: 389 - protein, 7 aa, Homo sapiens
  misc_feature: COV_3037
  misc_feature: Light CDR2
DVSNRVS

SEQ ID NO: 390 - protein, 9 aa, Homo sapiens
  misc_feature: COV_3037
  misc_feature: Light CDR3
MHSIQLPRA

SEQ ID NO: 391 - DNA, 372 bp, Homo sapiens
  CDS (1)..(372)
  misc_feature (1)..(372): COV_3040
caggtgcagctggtggagtctgggggaggcttggtacagccagggcggtccctgagactctcctgtacaacttccggattcaactttggtgataattctatgagctgggtccgccaggctccagggaagggcctggagtggataggcttcatttcaaacaaagctcatggtgggacaacagattacgccgcgtctgtgaaaggcagattcaccatctcaagggatgattccaaaagcatcgcctatctgcagatgaacagtctgaaagccgaggacacagccatatactactgtactaaagattcatatgggcattttcccagttatggttttgatatctggggccaagggacaatggtcaccgtctcttca

SEQ ID NO: 392 - protein, 124 aa, Homo sapiens
QVQLVESGGGLVQPGRSLRLSCTTSGFNFGDNSMSWVRQAPGKGLEWIGFISNKAHGGTTDYAASVKGRFTISRDDSKSIAYLQMNSLKAEDTAIYYCTKDSYGHFPSYGFDIWGQGTMVTVSS

SEQ ID NO: 393 - protein, 5 aa, Homo sapiens
  misc_feature: COV_3040
  misc_feature: Heavy CDR1
DNSMS

SEQ ID NO: 394 - protein, 19 aa, Homo sapiens
  misc_feature: COV_3040
  misc_feature: Heavy CDR2
FISNKAHGGTTDYAASVKG

SEQ ID NO: 395 - protein, 13 aa, Homo sapiens
  misc_feature: COV_3040
  misc_feature: Heavy CDR3
DSYGHFPSYGFDI

SEQ ID NO: 396 - DNA, 336 bp, Homo sapiens
  CDS (1)..(336)
  misc_feature (1)..(336): COV_3040
gatgttgtgatgacacagactcccctctctctgtccgtcacccctggacagccggcctccatctcctgcaagtctactcagagcctcgtacatactgatggaaagacctatttttattggttcctgcagaagccaggccagcctccacaactcctgatctatgatgtttccagtaggttctctggagtgccagataggttcagtggcagcgggtcagcgacagatttcacactgagaatcagccgggtggaggctgaggatgttggggtttattactgcatgcatagtataaactttcctcggacgttcggccaagggaccaaggtggaaatcaca

SEQ ID NO: 397 - protein, 112 aa, Homo sapiens
DVVMTQTPLSLSVTPGQPASISCKSTQSLVHTDGKTYFYWFLQKPGQPPQLLIYDVSSRFSGVPDRFSGSGSATDFTLRISRVEAEDVGVYYCMHSINFPRTFGQGTKVEIT

SEQ ID NO: 398 - protein, 16 aa, Homo sapiens
  misc_feature: COV_3040
  misc_feature: Light CDR1
KSTQSLVHTDGKTYFY

SEQ ID NO: 399 - protein, 7 aa, Homo sapiens
  misc_feature: COV_3040
  misc_feature: Light CDR2
DVSSRFS

SEQ ID NO: 400 - protein, 9 aa, Homo sapiens
  misc_feature: COV_3040
  misc_feature: Light CDR3
MHSINFPRT

SEQ ID NO: 401 - DNA, 372 bp, Homo sapiens
  CDS (1)..(372)
  misc_feature (1)..(321): COV_3043
gaggtgcaggtggtagagtctgggggaggcttggtacagccagggcggtccctgagactctcctgtacagcttctggattcaattttggtgataattctatgagctgggtccgccaggctccagggaaggggctggagtgggtaggcttcatttcaaatagagatcatagtgggacaacagactacgccgcgtctgtgaaaggcagattcaccatctcaagagatgattccaaaagcatcgcctatctgcagatgaacagcctgaaaaccgaggacacagccatatattattgtattagagattcatatgggcactttcccaattatggttttgatgtctggggccaagggacaatggtcaccgtctcttca

SEQ ID NO: 402 - protein, 124 aa, Homo sapiens
EVQVVESGGGLVQPGRSLRLSCTASGFNFGDNSMSWVRQAPGKGLEWVGFISNRDHSGTTDYAASVKGRFTISRDDSKSIAYLQMNSLKTEDTAIYYCIRDSYGHFPNYGFDVWGQGTMVTVSS

SEQ ID NO: 403 - protein, 5 aa, Homo sapiens
  misc_feature: COV_3043
  misc_feature: Heavy CDR1
DNSMS

SEQ ID NO: 404 - protein, 19 aa, Homo sapiens
  misc_feature: COV_3043
  misc_feature: Heavy CDR2
FISNRDHSGTTDYAASVKG

SEQ ID NO: 405 - protein, 13 aa, Homo sapiens
  misc_feature: COV_3043
  misc_feature: Heavy CDR3
DSYGHFPNYGFDV

SEQ ID NO: 406 - DNA, 336 bp, Homo sapiens
  CDS (1)..(336)
  misc_feature (1)..(336): COV_3043
gatgttgtgatgacacagactcccctctctctgtccgtcacccctggacagccggcttccatttcctgcaagtgtagtcagagcctcatacatagtgatggaaagacctatcaatattggttcctgcagaggccaggccagcctccacaactcctgatctatgatgtttccaatagggtctctggagtgccagataggttcagtggcagcgggtcagggacagatttcacactgaaaatcagccgggtggaggctgaagatgttggggtttattactgcatgcacagtataaattttcctcggacgttcggccaagggaccaaggtggaaatcaca

SEQ ID NO: 407 - protein, 112 aa, Homo sapiens
DVVMTQTPLSLSVTPGQPASISCKCSQSLIHSDGKTYQYWFLQRPGQPPQLLIYDVSNRVSGVPDRFSGSGSGTDFTLKISRVEAEDVGVYYCMHSINFPRTFGQGTKVEIT

SEQ ID NO: 408 - protein, 16 aa, Homo sapiens
  misc_feature: COV_3043
  misc_feature: Light CDR1
KCSQSLIHSDGKTYQY

SEQ ID NO: 409 - protein, 7 aa, Homo sapiens
  misc_feature: COV_3043
  misc_feature: Light CDR2
DVSNRVS

SEQ ID NO: 410 - protein, 9 aa, Homo sapiens
  misc_feature: COV_3043
  misc_feature: Light CDR3
MHSINFPRT

SEQ ID NO: 411 - DNA, 366 bp, Homo sapiens
  CDS (1)..(366)
  misc_feature (1)..(366): COV_3053
gaggtgcagctggtggagtctgggggaggcttggttcagccagggcggtccctgagactgtcctgtacagcctctggattcacccttggtgattatgctatgacctgggtccgccaggctccagggaaggggctggagtggcttggcatcattagaaacaaacgctatggagaaacaaaacaatacgccgcgtctgtgaaaggcagattcaccttctcaagagatgattccaaaggcatcggctatctgcagaggctcagtctaaaaatcgaggacacaggcgtctattattgtactagagaacatattgttcgggatgatgcttttgatgtctggggccaagggacaacggtcaccgtctcttcg

SEQ ID NO: 412 - protein, 122 aa, Homo sapiens
EVQLVESGGGLVQPGRSLRLSCTASGFTLGDYAMTWVRQAPGKGLEWLGIIRNKRYGETKQYAASVKGRFTFSRDDSKGIGYLQRLSLKIEDTGVYYCTREHIVRDDAFDVWGQGTTVTVSS

SEQ ID NO: 413 - protein, 5 aa, Homo sapiens
  misc_feature: COV_3053
  misc_feature: Heavy CDR1
DYAMT

SEQ ID NO: 414 - protein, 19 aa, Homo sapiens
  misc_feature: COV_3053
  misc_feature: Heavy CDR2
IIRNKRYGETKQYAASVKG

SEQ ID NO: 415 - protein, 11 aa, Homo sapiens
  misc_feature: COV_3053
  misc_feature: Heavy CDR3
EHIVRDDAFDV

SEQ ID NO: 416 - DNA, 339 bp, Homo sapiens
  CDS (1)..(339)
  misc_feature (1)..(339): COV_3053
gacatcgtgatgacccagtctccagactccctggctgtgtctctgggcgagagggccaccatcaactgcaagtccagccagagtgttttatacagttccaataataagaattacattgcttggtatcagcagagaccaggacagccacctaaacttctcatttattggacatctacccgggcatccggcgtccctgaccgattcagtggcagcgggtctgggacagatttcgctctcaccatcagcagtctgcaggctgaagatgtggcagtgtattactgtcaacaatattatactattcctcggacgttcggccaagggaccaaggtggaaatcaaa

SEQ ID NO: 417 - protein, 113 aa, Homo sapiens
DIVMTQSPDSLAVSLGERATINCKSSQSVLYSSNNKNYIAWYQQRPGQPPKLLIYWTSTRASGVPDRFSGSGSGTDFALTISSLQAEDVAVYYCQQYYTIPRTFGQGTKVEIK

SEQ ID NO: 418 - protein, 17 aa, Homo sapiens
  misc_feature: COV_3053
  misc_feature: Light CDR1
KSSQSVLYSSNNKNYIA

SEQ ID NO: 419 - protein, 7 aa, Homo sapiens
  misc_feature: COV_3053
  misc_feature: Light CDR2
WTSTRAS

SEQ ID NO: 420 - protein, 9 aa, Homo sapiens
  misc_feature: COV_3053
  misc_feature: Light CDR3
QQYYTIPRT

SEQ ID NO: 421 - DNA, 354 bp, Homo sapiens
  CDS (1)..(354)
  misc_feature (1)..(354): COV_3088
gaggtgcagctggtggagtctgggggaggcttggtacagcctggggggtccctgagactctcctgtgcagcctctggattcaccttcagtagctacgacatgcactgggtccgccaagctacaggaaaaggtctggagtgggtctcagctattggtactgctggtgacacatactatccaggctccgtgaagggccgattcaccatctccagagaaaatgccaagaactccttgtatcttcaaatgaacagcctgagagccggggacacggctgtgtattactgtgcaagaggaagtggctggccccccttctttgactactggggccagggaaccctggtcaccgtctcctca

SEQ ID NO: 422 - protein, 118 aa, Homo sapiens
EVQLVESGGGLVQPGGSLRLSCAASGFTFSSYDMHWVRQATGKGLEWVSAIGTAGDTYYPGSVKGRFTISRENAKNSLYLQMNSLRAGDTAVYYCARGSGWPPFFDYWGQGTLVTVSS

SEQ ID NO: 423 - protein, 5 aa, Homo sapiens
  misc_feature: COV_3088
  misc_feature: Heavy CDR1
SYDMH

SEQ ID NO: 424 - protein, 16 aa, Homo sapiens
  misc_feature: COV_3088
  misc_feature: Heavy CDR2
AIGTAGDTYYPGSVKG

SEQ ID NO: 425 - protein, 10 aa, Homo sapiens
  misc_feature: COV_3088
  misc_feature: Heavy CDR3
GSGWPPFFDY

SEQ ID NO: 426 - DNA, 327 bp, Homo sapiens
  CDS (1)..(327)
  misc_feature (1)..(327): COV_3088
tcctatgagctgactcagccaccctcagtgtcagtggccccaggaaagacggccaggattacctgtgggggaaacaacattggaagtaaaagtgtgcactggtaccagcagaagccaggccaggcccctgtgctggtcatctattatgatagcgaccggccctcagggatccctgagcgattctctggctccaactctgggaacacggccaccctgaccatcagcagggtcgaagccggggatgaggccgactattactgtcaggtgtgggatagtagtagtgatcaccattgggtgttcggcggagggaccaagctgaccgtccta

SEQ ID NO: 427 - protein, 109 aa, Homo sapiens
SYELTQPPSVSVAPGKTARITCGGNNIGSKSVHWYQQKPGQAPVLVIYYDSDRPSGIPERFSGSNSGNTATLTISRVEAGDEADYYCQVWDSSSDHHWVFGGGTKLTVL

SEQ ID NO: 428 - protein, 11 aa, Homo sapiens
  misc_feature: COV_3088
  misc_feature: Light CDR1
GGNNIGSKSVH

SEQ ID NO: 429 - protein, 7 aa, Homo sapiens
  misc_feature: COV_3088
  misc_feature: Light CDR2
YDSDRPS

SEQ ID NO: 430 - protein, 12 aa, Homo sapiens
  misc_feature: COV_3088
  misc_feature: Light CDR3
QVWDSSSDHHWV

SEQ ID NO: 431 - DNA, 381 bp, Homo sapiens
  CDS (1)..(381)
  misc_feature (1)..(381): COV_2056
gaggtgcagctggtggagtctgggggaggcgtggtccagcctgggaggtccctgagactctcctgtgcagcctctggattcaccttcagtatctatggcatgcactgggtccgccaggctccaggcaaggggctggagtgggtggcacttatatcatatgatggaactaataaatactatgcagactccgtgaagggccgattctccatctccagagacgattccaagaacacgctttatctgcaaatgaacagcctgagacctgaggacacggctgtgtattactgtgcgaaagtcttgatgatgggggatagtagtggttttagtctcggtgatgcttttgatatctggggccaagggacaatggtcaccgtctcttca

SEQ ID NO: 432 - protein, 127 aa, Homo sapiens
EVQLVESGGGVVQPGRSLRLSCAASGFTFSIYGMHWVRQAPGKGLEWVALISYDGTNKYYADSVKGRFSISRDDSKNTLYLQMNSLRPEDTAVYYCAKVLMMGDSSGFSLGDAFDIWGQGTMVTVSS

SEQ ID NO: 433 - protein, 5 aa, Homo sapiens
  misc_feature: COV_2056
  misc_feature: Heavy CDR1
IYGMH

SEQ ID NO: 434 - protein, 17 aa, Homo sapiens
  misc_feature: COV_2056
  misc_feature: Heavy CDR2
LISYDGTNKYYADSVKG

SEQ ID NO: 435 - protein, 18 aa, Homo sapiens
  misc_feature: COV_2056
  misc_feature: Hearvy CDR3
VLMMGDSSGFSLGDAFDI

SEQ ID NO: 436 - DNA, 321 bp, Homo sapiens
  CDS (1)..(321)
  misc_feature (1)..(321): COV_2056
gacatccagatgacccagtctccatcttccgtgtctgcatctgtaggagacagagtcaccatcacttgtcgggcgagtcagggtattagcaactggttagcctggtatcagcagaaaccagggaaagcccctaagctcctgatctatgctgcatccagtttgcaaagtggggtcccatcaaggttcagcggcagtgtatctgggacagatttcactctcaccatcagcagcctgcagcctgaagattttgcaacttactattgtcaacaggctaacagtttccctctcactttcggcggagggaccaaggtggacatcaaa

SEQ ID NO: 437 - protein, 107 aa, Homo sapiens
DIQMTQSPSSVSASVGDRVTITCRASQGISNWLAWYQQKPGKAPKLLIYAASSLQSGVPSRFSGSVSGTDFTLTISSLQPEDFATYYCQQANSFPLTFGGGTKVDIK

SEQ ID NO: 438 - protein, 11 aa, Homo sapiens
  misc_feature: COV_2056
  misc_feature: Light CDR1
RASQGISNWLA

SEQ ID NO: 439 - protein, 7 aa, Homo sapiens
  misc_feature: COV_2056
  misc_feature: Light CDR2
AASSLQS

SEQ ID NO: 440 - protein, 9 aa, Homo sapiens
  misc_feature: COV_2056
  misc_feature: Light CDR3
QQANSFPLT

SEQ ID NO: 441 - DNA, 366 bp, Homo sapiens
  CDS (1)..(366)
  misc_feature (1)..(366): COV_2172
gaagtgcagctggtggagtctgggggaggcgtggtccagcctgggaggtccctgagactctcctgtgcaccctctggattcaccttcagtacctatgccatgcactgggtccgccaggctccaggcaaggggctggagtgggtggcagttatatcatatgatggaagtatcaaatactatgcagactccgtgaagggccgattcaccatctccagagacaataccatgaacacggtgtttctgcaaatgaacagcctgagagctgaggacacggctgtgtatttctgtgcgaaagggggcgaaaggtgggagctattcacctcctttgactactggggccagggaacccaggtcaccgtctcctcc

SEQ ID NO: 442 - protein, 122 aa, Homo sapiens
EVQLVESGGGVVQPGRSLRLSCAPSGFTFSTYAMHWVRQAPGKGLEWVAVISYDGSIKYYADSVKGRFTISRDNTMNTVFLQMNSLRAEDTAVYFCAKGGERWELFTSFDYWGQGTQVTVSS

SEQ ID NO: 443 - protein, 5 aa, Homo sapiens
  misc_feature: COV_2172
  misc_feature: Heavy CDR1
TYAMH

SEQ ID NO: 444 - protein, 17 aa, Homo sapiens
  misc_feature: COV_2172
  misc_feature: Heavy CDR2
VISYDGSIKYYADSVKG

SEQ ID NO: 445 - protein, 13 aa, Homo sapiens
  misc_feature: COV_2172
  misc_feature: Heavy CDR3
GGERWELFTSFDY

SEQ ID NO: 446 - DNA, 330 bp, Homo sapiens
  CDS (1)..(330): COV_2172
cagtctgccctgactcagcctcgctcagtgtccgggtctcctggacagtcagtcaccatctcctgcactggaaccagcagtgatgttggtggttataactatgtctcctggtaccaacaacacccaggcaaagcccccaaactcatgatttatgatgtcagtaagcggccctcaggggtccctgatcgcttctctggctccaagtctggcaacacggcctccctgaccatctctgggctccaggctgaggatgaggctgattattactgctgctcatatgcaggcagctacactttcgtgttcggcggagggaccaagctgaccgtccta

SEQ ID NO: 447 - protein, 110 aa, Homo sapiens
QSALTQPRSVSGSPGQSVTISCTGTSSDVGGYNYVSWYQQHPGKAPKLMIYDVSKRPSGVPDRFSGSKSGNTASLTISGLQAEDEADYYCCSYAGSYTFVFGGGTKLTVL

SEQ ID NO: 448 - protein, 14 aa, Homo sapiens
  misc_feature: COV_2172
  misc_feature: Light CDR1
TGTSSDVGGYNYVS

SEQ ID NO: 449 - protein, 7 aa, Homo sapiens
  misc_feature: COV_2172
  misc_feature: Light CDR2
DVSKRPS

SEQ ID NO: 450 - protein, 10 aa, Homo sapiens
  misc_feature: COV_2172
  misc_feature: Light CDR3
CSYAGSYTFV

SEQ ID NO: 451 - DNA, 363 bp, Homo sapiens
caggtgcagctgcaggagtcgggcccaggactggtgaggccttcggggaccctgtccctcacctgcgctgtctctggtggctccatcagcagtagtaactggtggagttgggtccgccagcccccagggaaggggctggagtggattggggaaatctatcgtagtgggagcaccaactacaacccgtccctcaagagtcgagtcaccatatcagtagcccagtccaagaaccagttctccctgaacctgacctctgtgaccgccgcggacacggccgtgtattactgtgcgaagattatagtgggagctccctctgatgcttttgatatctggggccaagggacaatggtcaccgtctcttca

SEQ ID NO: 452 - protein, 121 aa, Homo sapiens
QVQLQESGPGLVRPSGTLSLTCAVSGGSISSSNWWSWVRQPPGKGLEWIGEIYRSGSTNYNPSLKSRVTISVAQSKNQFSLNLTSVTAADTAVYYCAKIIVGAPSDAFDIWGQGTMVTVSS

SEQ ID NO: 453 - protein, 6 aa, Homo sapiens
SSNWWS

SEQ ID NO: 454 - protein, 16 aa, Homo sapiens
EIYRSGSTNYNPSLKS

SEQ ID NO: 455 - protein, 12 aa, Homo sapiens
IIVGAPSDAFDI

SEQ ID NO: 456 - DNA, 330 bp, Homo sapiens
cagtctgtgctgactcagccaccctcagcgtctgggacccccgggcagagggtcaccatctcttgttctggaagcagctccaacatcggaagtaatcatgtatactggtaccagcagctcccaggaacggcccccaaactcctcatctataggaataatcagcggccctcaggggtccctgaccgattctctggctccaagtctggcacctcagcctccctggccatcagtgggctccggtccgaggatgaggctgattattactgtgcagcatgggatgacagcctgagtgtggtattcggcggagggaccaagctgaccgtcctaggt

SEQ ID NO: 457 - protein, 110 aa, Homo sapiens
QSVLTQPPSASGTPGQRVTISCSGSSSNIGSNHVYWYQQLPGTAPKLLIYRNNQRPSGVPDRFSGSKSGTSASLAISGLRSEDEADYYCAAWDDSLSVVFGGGTKLTVLG

SEQ ID NO: 458 - protein, 13 aa, Homo sapiens
SGSSSNIGSNHVY

SEQ ID NO: 459 - protein, 7 aa, Homo sapiens
RNNQRPS

SEQ ID NO: 460 - protein, 10 aa, Homo sapiens
AAWDDSLSVV

SEQ ID NO: 461 - DNA, 363 bp, Homo sapiens
caggtgcagctggtggagtctgggggaggcgtggtccagcctgggaggtccctgagactctcctgtgcagcctctggattcaccttcaatacctatgctatgcactgggtccgccaggctccaggcaaggggctggagtgggtggcaattatatcatatgatggaggcaataaatactacgcagactccatgaagggccgattcaccatctccagagacaattccaagaacacactgtatctgcaaatgaacagcctgagagctgaggacacggctgtgtattactgtgcgagagcccgaactgggaactactactacggtatggacgtctggggccaagggaccacggtcaccgtctcctca

SEQ ID NO: 462 - protein, 121 aa, Homo sapiens
QVQLVESGGGVVQPGRSLRLSCAASGFTFNTYAMHWVRQAPGKGLEWVAIISYDGGNKYYADSMKGRFTISRDNSKNTLYLQMNSLRAEDTAVYYCARARTGNYYYGMDVWGQGTTVTVSS

SEQ ID NO: 463 - protein, 5 aa, Homo sapiens
TYAMH

SEQ ID NO: 464 - protein, 17 aa, Homo sapiens
IISYDGGNKYYADSMKG

SEQ ID NO: 465 - protein, 12 aa, Homo sapiens
ARTGNYYYGMDV

SEQ ID NO: 466 - DNA, 324 bp, Homo sapiens
gacatccagatgacccagtctccatcctccctgtctgcatctgtaggagacagagtcaccatcacttgccgggcaagtcagagcattagcagctatttaaattggtatcagcagaaaccagggaaagcccctaagctcctgatctatgctgcatccagtttgcaaagtggggtcccatcaaggttcagtggcagtggatctgggacagatttcactctcaccatcagcagtctgcaacctgaagattttgcaacttactactgtcaacagagttacagtacccctctcactttcggcggagggaccaaggtggagatcaaacga

SEQ ID NO: 467 - protein, 108 aa, Homo sapiens
DIQMTQSPSSLSASVGDRVTITCRASQSISSYLNWYQQKPGKAPKLLIYAASSLQSGVPSRFSGSGSGTDFTLTISSLQPEDFATYYCQQSYSTPLTFGGGTKVEIKR

SEQ ID NO: 468 - protein, 11 aa, Homo sapiens
RASQSISSYLN

SEQ ID NO: 469 - protein, 7 aa, Homo sapiens
AASSLQS

SEQ ID NO: 470 - protein, 9 aa, Homo sapiens
QQSYSTPLT

SEQ ID NO: 471 - DNA, 351 bp, Homo sapiens
caggtgcatctgcaggagtcgggcccaggactggtgaagccttcggaaaccctgtccctcacctgcactgtctctggtggctccatcagtagttactactggagctggatccggcagcccccagggaagggactggagtggattgggtatatctatgacagtgggagcaccaactacaacccctccctcaagagtcgagtcaccatatcagtagacacgtccaagaaccagttctccctgaagctgagctctgtgaccgctgcggacacggccgtgtattactgtgcgagatcggttcggggagttaccattgactactggggccagggaaccctggtcaccgtctcctca

SEQ ID NO: 472 - protein, 117 aa, Homo sapiens
QVHLQESGPGLVKPSETLSLTCTVSGGSISSYYWSWIRQPPGKGLEWIGYIYDSGSTNYNPSLKSRVTISVDTSKNQFSLKLSSVTAADTAVYYCARSVRGVTIDYWGQGTLVTVSS

SEQ ID NO: 473 - protein, 5 aa, Homo sapiens
SYYWS

SEQ ID NO: 474 - protein, 16 aa, Homo sapiens
YIYDSGSTNYNPSLKS

SEQ ID NO: 475 - protein, 9 aa, Homo sapiens
SVRGVTIDY

SEQ ID NO: 476 - DNA, 336 bp, Homo sapiens
gacatccagatgacccagtctccatcctccctgtctgcatctgtaggagacagagtcaccatcacttgccgggcaagtcagagcattagcaatagcattagcagctatttaaattggtatcagaagaaaccagggaaagcccctaagctcctgatctatgctgcatccagtttgcaaagtggggtcccatcaaggttcagtggcagtggatctgggacagatttcactctcaccatcagcagtctgcaacctgaagattttgcaacttactactgtcaacagagttacagtacccctacgacgttcggccaagggaccaaggtggaaatcaagcga

SEQ ID NO: 477 - protein, 112 aa, Homo sapiens
DIQMTQSPSSLSASVGDRVTITCRASQSISNSISSYLNWYQKKPGKAPKLLIYAASSLQSGVPSRFSGSGSGTDFTLTISSLQPEDFATYYCQQSYSTPTTFGQGTKVEIKR

SEQ ID NO: 478 - protein, 15 aa, Homo sapiens
RASQSISNSISSYLN

SEQ ID NO: 479 - protein, 7 aa, Homo sapiens
AASSLQS

SEQ ID NO: 480 - protein, 9 aa, Homo sapiens
QQSYSTPTT

SEQ ID NO: 481 - DNA, 351 bp, Homo sapiens
caggtgcagttggtggagtctgggggaggcgtggtccagcctgggaggtccctgagactctcctgtgcagcctctagattcaccttcagtagttatgctatgcactgggtccgccaggctccaggcaaggggctggagtgggtggcagttatatcatttgatggaagcaataagtactacgcagactccgtgaagggccgattcaccatcttcagagacaattccaagaacacgctgtctctgcaaatgaacagcctgagaactgaggacacggctatgtattactgtgcgagtcctgcgggttactacgagagtttgtggggccaggggaccctggtcaccgtctcctca

SEQ ID NO: 482 - protein, 117 aa, Homo sapiens
QVQLVESGGGVVQPGRSLRLSCAASRFTFSSYAMHWVRQAPGKGLEWVAVISFDGSNKYYADSVKGRFTIFRDNSKNTLSLQMNSLRTEDTAMYYCASPAGYYESLWGQGTLVTVSS

SEQ ID NO: 483 - protein, 5 aa, Homo sapiens
SYAMH

SEQ ID NO: 484 - protein, 17 aa, Homo sapiens
VISFDGSNKYYADSVKG

SEQ ID NO: 485 - protein, 8 aa, Homo sapiens
PAGYYESL

SEQ ID NO: 486 - DNA, 324 bp, Homo sapiens
tcctatgagctgacacagccaccctcggtgtcagtgtctccagggcagacggccagggtcacctgctctggagatgcattgtcaaagcagtatggtttttggtatcagcagaagccaggccaggcccctaccctggtaatatataaagacactgagaggccctcagggatccctgagcgattctctggctccggctcagggacaacagtcaccttgaccatcagtggagtccaggcagaggacgaggctgactattactgtcaatcaacagacaacagtggtcgttgggtgttcggcggagggaccaagctgaccgtcctaggt

SEQ ID NO: 487 - protein, 108 aa, Homo sapiens
SYELTQPPSVSVSPGQTARVTCSGDALSKQYGFWYQQKPGQAPTLVIYKDTERPSGIPERFSGSGSGTTVTLTISGVQAEDEADYYCQSTDNSGRWVFGGGTKLTVLG

SEQ ID NO: 488 - protein, 11 aa, Homo sapiens
SGDALSKQYGF

SEQ ID NO: 489 - protein, 7 aa, Homo sapiens
KDTERPS

SEQ ID NO: 490 - protein, 10 aa, Homo sapiens
QSTDNSGRWV

SEQ ID NO: 491 - DNA, 357 bp, Homo sapiens
caggtgcagctggtggagtctgggggaggcgtggtccagcctgggacgtccctgagactctcctgtgaagcctctggattcaccttcagtgcctatggcatgcactgggtccgccaggctccaggcaaggggctggagtgggtggcaatttcaaggaatgatggaactactaaatattatgcagactcagtgaagggccgactcaccatctccagagacaattccaagaacacgctgtatctgcaaatgaacagcctgacaagtgaggacacggccgtctattactgtgcgaatcagtgtggtggtggctgctctgttgactcctggggccaaggaaccctggtcaccgtctcctca

SEQ ID NO: 492 - protein, 119 aa, Homo sapiens
QVQLVESGGGVVQPGTSLRLSCEASGFTFSAYGMHWVRQAPGKGLEWVAISRNDGTTKYYADSVKGRLTISRDNSKNTLYLQMNSLTSEDTAVYYCANQCGGGCSVDSWGQGTLVTVSS

SEQ ID NO: 493 - protein, 5 aa, Homo sapiens
AYGMH

SEQ ID NO: 494 - protein, 17 aa, Homo sapiens
ISRNDGTTKYYADSVKG

SEQ ID NO: 495 - protein, 10 aa, Homo sapiens
QCGGGCSVDS

SEQ ID NO: 496 - DNA, 330 bp, Homo sapiens
caggctgtggtgactcaggaggcctcactgactgtgtccccaggagggacagtcactctcacctgtggctccagcactggatctgtcaccagtggtcatgccccctactggttccaacagaagcctggccaagcccccaggacactaatttttgatacaacccacaaacactcctggacccctgcccggttttcaggctccctccttgggggcaaagctgccctgaccctttcgggtgcgcagcctgaagatgaggctgagtattactgcttgctctcctttggtggtgctcatgtcttcggaactgggaccaaggtcaccgtcctaggt

SEQ ID NO: 497 - protein, 110 aa, Homo sapiens
QAVVTQEASLTVSPGGTVTLTCGSSTGSVTSGHAPYWFQQKPGQAPRTLIFDTTHKHSWTPARFSGSLLGGKAALTLSGAQPEDEAEYYCLLSFGGAHVFGTGTKVTVLG

SEQ ID NO: 498 - protein, 14 aa, Homo sapiens
GSSTGSVTSGHAPY

SEQ ID NO: 499 - protein, 7 aa, Homo sapiens
DTTHKHS

SEQ ID NO: 500 - protein, 9 aa, Homo sapiens
LLSFGGAHV

SEQ ID NO: 501 - DNA, 387 bp, Homo sapiens
gaggtgcagctggtgcagtctggagcagaggtgaaaaagccgggggagtctctgaagatctcctgtaagagttctggatacacctttaccagtttctggatcgcctgggtgcgccagttgcccgggaaaggcctggagtggatggggatcatctatcctggtgactctgataccaaatacagcccgtccttccaaggccaggtcaccatctcagccgacaagtccatcagcaccgcctacctgcagtggagcagcctgaaggcctcggacaccgccatgtattattgtgcgagactcagaggatcttgtagtaatggtgtatgctacgcctactactacaacgctatggacgtctggggcccagggaccacggtcaccgtctcctca

SEQ ID NO: 502 - protein, 129 aa, Homo sapiens
EVQLVQSGAEVKKPGESLKISCKSSGYTFTSFWIAWVRQLPGKGLEWMGIIYPGDSDTKYSPSFQGQVTISADKSISTAYLQWSSLKASDTAMYYCARLRGSCSNGVCYAYYYNAMDVWGPGTTVTVSS

SEQ ID NO: 503 - protein, 5 aa, Homo sapiens
SFWIA

SEQ ID NO: 504 - protein, 17 aa, Homo sapiens
IIYPGDSDTKYSPSFQG

SEQ ID NO: 505 - protein, 20 aa, Homo sapiens
LRGSCSNGVCYAYYYNAMDV

SEQ ID NO: 506 - DNA, 333 bp, Homo sapiens
cagtctgccctgactcagcctgcctccgtgtctgggtctcccggacagtcgatcaccatctcctgcactggaaccagcagtgacattggtcgttataactatgtctcctggtaccaacaccacccaggcaaagcccccaaactcatgatttatgaggtcagtaatcggccctcaggggtttctaatcgcttctctggctccaagtctggcaacacggcctccctgaccatctctgggctccaggctgaggacgaggctgattattactgcacctcatatacaagcggcagcactctcgggttcggcggagggaccaaggtgaccgtcctgggt

SEQ ID NO: 507 - protein, 111 aa, Homo sapiens
QSALTQPASVSGSPGQSITISCTGTSSDIGRYNYVSWYQHHPGKAPKLMIYEVSNRPSGVSNRFSGSKSGNTASLTISGLQAEDEADYYCTSYTSGSTLGFGGGTKVTVLG

SEQ ID NO: 508 - protein, 14 aa, Homo sapiens
TGTSSDIGRYNYVS

SEQ ID NO: 509 - protein, 7 aa, Homo sapiens
EVSNRPS

SEQ ID NO: 510 - protein, 10 aa, Homo sapiens
TSYTSGSTLG

SEQ ID NO: 511 - DNA, 351 bp, Homo sapiens
gaggagaaactggtggagtctgggggagacttggtccagccggggggttctttgagaatctcttgtgaagtctccggatttagtcttagtaaatattggatgaactgggtccgtcaggctccaggaaaagggctgcagtgggtggccaacatagaggaagatggaagtgagagaaactatgcggactctgtgaagggccgattcaccatctccagagacaacgctaggaattcgctgtatctacaaatgaacagcctgagagtcgaagacacggccgtgtatctgtgtacggcaggccactatgccggcccgtggggttggggccagggaaccctggtcaccgtctcctca

SEQ ID NO: 512 - protein, 117 aa, Homo sapiens
EEKLVESGGDLVQPGGSLRISCEVSGFSLSKYWMNWVRQAPGKGLQWVANIEEDGSERNYADSVKGRFTISRDNARNSLYLQMNSLRVEDTAVYLCTAGHYAGPWGWGQGTLVTVSS

SEQ ID NO: 513 - protein, 5 aa, Homo sapiens
KYWMN

SEQ ID NO: 514 - protein, 17 aa, Homo sapiens
NIEEDGSERNYADSVKG

SEQ ID NO: 515 - protein, 8 aa, Homo sapiens
GHYAGPWG

SEQ ID NO: 516 - DNA, 324 bp, Homo sapiens
gacatccagatgacccagtcaccatcctccctgtctgcatctgttggggacagagtcaccgtcacttgtcgggcgagtcaggacattggtcactatttagcctggtatcaacagaaaccaggaaagactcctaacctcctgatctatgatgcatttaatttggagtcaggggtcccacctcgattcggaggcagtggatctgggacagatttcactctcaccatcagcagcctgcagcctgaggatgcggcaacttattactgtcaaaaatatgacagtgtcccgtggacgttcggccaagggaccaaggtggagatcaagcga

SEQ ID NO: 517 - protein, 108 aa, Homo sapiens
DIQMTQSPSSLSASVGDRVTVTCRASQDIGHYLAWYQQKPGKTPNLLIYDAFNLESGVPPRFGGSGSGTDFTLTISSLQPEDAATYYCQKYDSVPWTFGQGTKVEIKR

SEQ ID NO: 518 - protein, 11 aa, Homo sapiens
RASQDIGHYLA

SEQ ID NO: 519 - protein, 7 aa, Homo sapiens
DAFNLES

SEQ ID NO: 520 - protein, 9 aa, Homo sapiens
QKYDSVPWT

SEQ ID NO: 521 - DNA, 351 bp, Homo sapiens
caggtgcacctggtgcagtctggggctgaggtgcagaaacctggggcctcagtgaagatttcctgcaaggcatctggggacaccttcagtgaatcttatgtccactgggtgcgacaggcccctggaagcggacttgagtggatggggataatcaacactagggacggtgacacaaattacacacaccagttccaggacagagtcatgatgaccactgacacgtccacgagcacggtcttcttggagttgtacagcctgacttctgaggacacggccgtgtattactgtgcgagagccccagaccaatactttgactactggggccagggaagtccggtcaccgtctccgca

SEQ ID NO: 522 - protein, 117 aa, Homo sapiens
QVHLVQSGAEVQKPGASVKISCKASGDTFSESYVHWVRQAPGSGLEWMGIINTRDGDTNYTHQFQDRVMMTTDTSTSTVFLELYSLTSEDTAVYYCARAPDQYFDYWGQGSPVTVSA

SEQ ID NO: 523 - protein, 5 aa, Homo sapiens
ESYVH

SEQ ID NO: 524 - protein, 17 aa, Homo sapiens
IINTRDGDTNYTHQFQD

SEQ ID NO: 525 - protein, 8 aa, Homo sapiens
APDQYFDY

SEQ ID NO: 526 - DNA, 339 bp, Homo sapiens
gatattgtgatgacccagacaccactctcctcacctgtcacccttggacagccggcctccatctcctgtcggtctagtgaaagcctcgtacacagtaatgggaacacctacttgagttggcttcagcagaggccaggccagcctccaaaactcctaatttatagggtttctaaccgattctctggggtcccagacagattcagtggcagtggggcagggacagaattcacactgaaaatcagcagggtggaggctgaggatgtcggggtttattattgcatgcaagctagacattttcctcggacgttcggccaagggaccaaggtggaaatcaaacga

SEQ ID NO: 527 - protein, 113 aa, Homo sapiens
DIVMTQTPLSSPVTLGQPASISCRSSESLVHSNGNTYLSWLQQRPGQPPKLLIYRVSNRFSGVPDRFSGSGAGTEFTLKISRVEAEDVGVYYCMQARHFPRTFGQGTKVEIKR

SEQ ID NO: 528 - protein, 16 aa, Homo sapiens
RSSESLVHSNGNTYLS

SEQ ID NO: 529 - protein, 7 aa, Homo sapiens
RVSNRFS

SEQ ID NO: 530 - protein, 9 aa, Homo sapiens
MQARHFPRT

SEQ ID NO: 531 - DNA, 357 bp, Homo sapiens
caggtgcagctggtggagtctgggggaggcttggtcaagcctggggggtccctgagactctcctgtgcagcctctggattcactttcagtgaatactccatgagttggatacgccaggctccagggaaggggctagagtgggtttcattcattggaggcagtggtgattacacaaactacgcagactctgtgaagggccgattcaccatctccagagacaacgccaagaatttattgtatctgcaaatgaacaccctgagagtcgaagacacggctgtgtattactgtgcgagaaggggctctgctaactgcggggatgattggtggggccagggaaccctggtcaccgtctcctca

SEQ ID NO: 532 - protein, 119 aa, Homo sapiens
QVQLVESGGGLVKPGGSLRLSCAASGFTFSEYSMSWIRQAPGKGLEWVSFIGGSGDYTNYADSVKGRFTISRDNAKNLLYLQMNTLRVEDTAVYYCARRGSANCGDDWWGQGTLVTVSS

SEQ ID NO: 533 - protein, 5 aa, Homo sapiens
EYSMS

SEQ ID NO: 534 - protein, 17 aa, Homo sapiens
FIGGSGDYTNYADSVKG

SEQ ID NO: 535 - protein, 10 aa, Homo sapiens
RGSANCGDDW

SEQ ID NO: 536 - DNA, 339 bp, Homo sapiens
gacatcgtgatgacccagtctccagactccctggctgtgtctctgggcgagagggccaccatcaactgcaagtccagccacggtgtcttatacaggtccaacaataaggaccacttagcttggtaccagcaaaaaccagggcaccctcctaagctgctcatttactgggcatctatccgggaatccggggtccctgaccgcttcagtggcagcgggtctgggacagatttcactctcaccatcagcggcctgcaggctgaagatgtggcagtttattactgtcagcaatattatggtaatcccactttcggcggagggaccaaggtggagatcaaacga

SEQ ID NO: 537 - protein, 113 aa, Homo sapiens
DIVMTQSPDSLAVSLGERATINCKSSHGVLYRSNNKDHLAWYQQKPGHPPKLLIYWASIRESGVPDRFSGSGSGTDFTLTISGLQAEDVAVYYCQQYYGNPTFGGGTKVEIKR

SEQ ID NO: 538 - protein, 17 aa, Homo sapiens
KSSHGVLYRSNNKDHLA

SEQ ID NO: 539 - protein, 7 aa, Homo sapiens
WASIRES

SEQ ID NO: 540 - protein, 8 aa, Homo sapiens
QQYYGNPT

SEQ ID NO: 541 - DNA, 354 bp, Homo sapiens
gaggtgcagttggtggagtctgggggaggcttggtacagcctggggggtccctgagactctcctgtgcagcctcaggattcatcttcaatattcatggcatgaactggttccgccaggctccagggaagggactggagtggatttcacacattggcacttctggcgagtccagggacatacactacgcagactctgtgaggggccgattcaccatctccagagacaatggcaagcactctctgtatcttcaaatgaacagcctgactgccgaagacacggctgtgtatttctgtgcgagaggacttacgaactcggacctttggggccagggaaccctggtcaccgtctcgtca

SEQ ID NO: 542 - protein, 118 aa, Homo sapiens
EVQLVESGGGLVQPGGSLRLSCAASGFIFNIHGMNWFRQAPGKGLEWISHIGTSGESRDIHYADSVRGRFTISRDNGKHSLYLQMNSLTAEDTAVYFCARGLTNSDLWGQGTLVTVSS

SEQ ID NO: 543 - protein, 5 aa, Homo sapiens
IHGMN

SEQ ID NO: 544 - protein, 19 aa, Homo sapiens
HIGTSGESRDIHYADSVRG

SEQ ID NO: 545 - protein, 7 aa, Homo sapiens
GLTNSDL

SEQ ID NO: 546 - DNA, 339 bp, Homo sapiens
gaaattgtgatgacccagactccactctcttcacctgtcacccttggacagccggcctccatctcctgcaggtctagtgaaagcctcgtgcacagtaatggagatacctacttaagttggcttcaccagaggccaggccagcctccaagactcctactttataagatttctaaccggttctctggggtcccagacagattcagtggcagtggggcagggacagatttcacattgacaatcagtagggtggaagctgaggatgtcggcctttattactgcatgcaagcaacatcatttcctcggacgttcggccaagggaccaaggtggagatcaaacga

SEQ ID NO: 547 - protein, 113 aa, Homo sapiens
EIVMTQTPLSSPVTLGQPASISCRSSESLVHSNGDTYLSWLHQRPGQPPRLLLYKISNRFSGVPDRFSGSGAGTDFTLTISRVEAEDVGLYYCMQATSFPRTFGQGTKVEIKR

SEQ ID NO: 548 - protein, 16 aa, Homo sapiens
RSSESLVHSNGDTYLS

SEQ ID NO: 549 - protein, 7 aa, Homo sapiens
KISNRFS

SEQ ID NO: 550 - protein, 9 aa, Homo sapiens
MQATSFPRT

SEQ ID NO: 551 - DNA, 363 bp, Homo sapiens
caggtgcagctggtggagtctgggggaggcgtggtccagcctgggaggtccctgagactctcctgtgcagcgtctggattcaccttcagtactcatggcatgcactgggtccgccaggctccaggcaaggggccggagtgggtggcagttatatggtatgatggaagtaataaatactatgcagactccgtgaagggccgattcaccatctccagagacaattccaagaacaccctgtatctgcacatgaacagcctgagagccgaggacacggctgtatattattgtgcgagagatcaggcagtggctggtaacctcggctttgactactggggccagggaaccctggtcaccgtctcctca

SEQ ID NO: 552 - protein, 121 aa, Homo sapiens
QVQLVESGGGVVQPGRSLRLSCAASGFTFSTHGMHWVRQAPGKGPEWVAVIWYDGSNKYYADSVKGRFTISRDNSKNTLYLHMNSLRAEDTAVYYCARDQAVAGNLGFDYWGQGTLVTVSS

SEQ ID NO: 553 - protein, 5 aa, Homo sapiens
THGMH

SEQ ID NO: 554 - protein, 17 aa, Homo sapiens
VIWYDGSNKYYADSVKG

SEQ ID NO: 555 - protein, 12 aa, Homo sapiens
DQAVAGNLGFDY

SEQ ID NO: 556 - DNA, 333 bp, Homo sapiens
cagtctgtgctgactcagccaccctcagcgtctgggacccccgggcagagggtcaccatctcttgttctggaagcagctccaatatcggaagtaattatgtatactggtaccagcagctcccaggaacggcccccaaactcctcatctataggaataatcagcggccctcaggggtccctgaccgattctctggctccaagtctggcacctcagcctccctggccatcagtgggctccggtccgaggatgaggctgattattactgtgcagcaagggatgacagcctgagtggtcacgtgttcggaggaggcacccagctgaccgtcctcggt

SEQ ID NO: 557 - protein, 111 aa, Homo sapiens
QSVLTQPPSASGTPGQRVTISCSGSSSNIGSNYVYWYQQLPGTAPKLLIYRNNQRPSGVPDRFSGSKSGTSASLAISGLRSEDEADYYCAARDDSLSGHVFGGGTQLTVLG

SEQ ID NO: 558 - protein, 13 aa, Homo sapiens
SGSSSNIGSNYVY

SEQ ID NO: 559 - protein, 7 aa, Homo sapiens
RNNQRPS

SEQ ID NO: 560 - protein, 11 aa, Homo sapiens
AARDDSLSGHV

SEQ ID NO: 561 - DNA, 357 bp, Homo sapiens
ggggcacaactgttggagtctgggggagccttggtacagccgggggggtccctgagactctcctgtgcagcctctggattcacctttaacaactatggcatgggctgggtccgccagactccggggaaggggctggagtgggtctcaactattaatgataatggtggtaacacacattacgcagactccgtgaagggccggttcaccatttccagagacaattccaagcacacgctatatctgcaaatgaatagcctgagagtcgaggacacggccctatattactgtgcgaaagacgtcggaggaccagccctctttgagtattggggccatgggaccctggtcaccgtctcctca

SEQ ID NO: 562 - protein, 119 aa, Homo sapiens
GAQLLESGGALVQPGGSLRLSCAASGFTFNNYGMGWVRQTPGKGLEWVSTINDNGGNTHYADSVKGRFTISRDNSKHTLYLQMNSLRVEDTALYYCAKDVGGPALFEYWGHGTLVTVSS

SEQ ID NO: 563 - protein, 5 aa, Homo sapiens
NYGMG

SEQ ID NO: 564 - protein, 17 aa, Homo sapiens
TINDNGGNTHYADSVKG

SEQ ID NO: 565 - protein, 10 aa, Homo sapiens
DVGGPALFEY

SEQ ID NO: 566 - DNA, 339 bp, Homo sapiens
gatattgtgatgacccagactccactctcctcatctgtcacccttggacagccggcctccatctcctgcaggtctagtcaaagcctcgtacacagtgatgggaacacctacttgacttggcttcagcagaggccaggccagcctccaaaactcctaatttataagatttctaaccggttgtctggggtcccagacagattcagtggcagtggggcagggacagatttcacactgaaaatcagcagggtagaagctgaggatgtcggggtttattactgcatgcaagctacacactttcctcggacttttggccaggggaccaagctggagatcaaacga

SEQ ID NO: 567 - protein, 113 aa, Homo sapiens
DIVMTQTPLSSSVTLGQPASISCRSSQSLVHSDGNTYLTWLQQRPGQPPKLLIYKISNRLSGVPDRFSGSGAGTDFTLKISRVEAEDVGVYYCMQATHFPRTFGQGTKLEIKR

SEQ ID NO: 568 - protein, 16 aa, Homo sapiens
RSSQSLVHSDGNTYLT

SEQ ID NO: 569 - protein, 7 aa, Homo sapiens
KISNRLS

SEQ ID NO: 570 - protein, 9 aa, Homo sapiens
MQATHFPRT

SEQ ID NO: 571 - DNA, 351 bp, Homo sapiens
caggtgcagctggtgcagtctggggctgaggtgcaaaagcctggggcctcagtgaaggtttcctgcaaggcatctggggacaccttcagctaccattatgtccactgggtgcgacaggcccctggatacgggcttgagtggatgggaataatcgaccctaggaatgctgacacaaattacacacagaaattccagggcagagtcaccatgaccactgacacgtccacgaatacggtcttcttggagttgagcagcctgacgtctgacgacacggccgtatattactgtgcgagagccccagaccaatactttgactactggggccagggaagtccggtcaccgtctccgca

SEQ ID NO: 572 - protein, 117 aa, Homo sapiens
QVQLVQSGAEVQKPGASVKVSCKASGDTFSYHYVHWVRQAPGYGLEWMGIIDPRNADTNYTQKFQGRVTMTTDTSTNTVFLELSSLTSDDTAVYYCARAPDQYFDYWGQGSPVTVSA

SEQ ID NO: 573 - protein, 5 aa, Homo sapiens
YHYVH

SEQ ID NO: 574 - protein, 17 aa, Homo sapiens
IIDPRNADTNYTQKFQG

SEQ ID NO: 575 - protein, 8 aa, Homo sapiens
APDQYFDY

SEQ ID NO: 576 - DNA, 339 bp, Homo sapiens
gatattgtgatgacccagacaccactctcctcacctgtcacccttggacagccggcctccatctcctgtaagtctagtgaaagcctcctacacagtgatgggaacacctacttgagttggcttcagcagaggccaggccagcctccaagactcctaatttatagggtttctaaccggttctctggggtcccagacagattcagtggcagtggggcagggacagatttcacactgagaatcagcagggtggaggctgaggatgtcggggtttattactgcatgcaagctacacagtttcctcggacgttcggccaagggaccaaggtggaaatcaaacga

SEQ ID NO: 577 - protein, 113 aa, Homo sapiens
DIVMTQTPLSSPVTLGQPASISCKSSESLLHSDGNTYLSWLQQRPGQPPRLLIYRVSNRFSGVPDRFSGSGAGTDFTLRISRVEAEDVGVYYCMQATQFPRTFGQGTKVEIKR

SEQ ID NO: 578 - protein, 16 aa, Homo sapiens
KSSESLLHSDGNTYLS

SEQ ID NO: 579 - protein, 7 aa, Homo sapiens
RVSNRFS

SEQ ID NO: 580 - protein, 9 aa, Homo sapiens
MQATQFPRT

SEQ ID NO: 581 - DNA, 384 bp, Homo sapiens
caggtgcagctgcaggagtcgggcccaggactggtgaagccttcggagaccctgtccctcacctgcactgtctctggtggctccatcagtagttactattggagctggatccggcagcccccagggaagggactggagtggattgggtatatctattccggtgggagcaccaactacaacccctccctcaagagtcgagtcaccatatcagtagacacgtccaagaagcagttctccctgaagctgagctctgtgaccgccgcagacacggccgtgtattactgtgcgagacatttaaaggcttgtactaatggtgtatgtcttacccactactactacgctttggacgtctggggccaagggacaacggtcaccgtctcctca

SEQ ID NO: 582 - protein, 128 aa, Homo sapiens
QVQLQESGPGLVKPSETLSLTCTVSGGSISSYYWSWIRQPPGKGLEWIGYIYSGGSTNYNPSLKSRVTISVDTSKKQFSLKLSSVTAADTAVYYCARHLKACTNGVCLTHYYYALDVWGQGTTVTVSS

SEQ ID NO: 583 - protein, 5 aa, Homo sapiens
SYYWS

SEQ ID NO: 584 - protein, 16 aa, Homo sapiens
YIYSGGSTNYNPSLKS

SEQ ID NO: 585 - protein, 20 aa, Homo sapiens
HLKACTNGVCLTHYYYALDV

SEQ ID NO: 586 - DNA, 339 bp, Homo sapiens
cagtctgtgctgacgcagccgccctcagtgtctggggccccagggcagagggtcaccatctcctgcactgggagcagctccaacatcggggcaggttatgatgtacactggtaccagcagcttccagaaacagcccccaaactcctcatctatggtaacaacaatcggccctcaggggtccctgaccgattctctggctccaggtctggcacctcagcctccctggccatcactgggctccaggctgaggatgaggctgattattactgccagtccaatgacggcagcctgagtgattcgggggtgttcggcggagggaccaagttgaccgtcctaggt

SEQ ID NO: 587 - protein, 113 aa, Homo sapiens
QSVLTQPPSVSGAPGQRVTISCTGSSSNIGAGYDVHWYQQLPETAPKLLIYGNNNRPSGVPDRFSGSRSGTSASLAITGLQAEDEADYYCQSNDGSLSDSGVFGGGTKLTVLG

SEQ ID NO: 588 - protein, 14 aa, Homo sapiens
TGSSSNIGAGYDVH

SEQ ID NO: 589 - protein, 7 aa, Homo sapiens
GNNNRPS

SEQ ID NO: 590 - protein, 12 aa, Homo sapiens
QSNDGSLSDSGV

SEQ ID NO: 591 - DNA, 387 bp, Homo sapiens
gaggtgcagctggtggagtctgggggaggcctggtcaagcctggggggtccctgagactctcctgtgcagcctctggattcaccttcagtagctatagcatgaactgggtccgccaggctccagggaaggggctggagtgggtctcatccattagtagtagtaatgcttacatatactccgcagactcagtgaagggccgattcaccatctccagagacaacgccaagaactcactgtatctgcaaatgaacagcctgagagccgacgacacggctgtgtattactgtgcgagagggggaaggggtcttagcagctcgcccggacgtctcgactactactacggtctggacgtctggggccaagggaccacggtcaccgtctcctca

SEQ ID NO: 592 - protein, 129 aa, Homo sapiens
EVQLVESGGGLVKPGGSLRLSCAASGFTFSSYSMNWVRQAPGKGLEWVSSISSSNAYIYSADSVKGRFTISRDNAKNSLYLQMNSLRADDTAVYYCARGGRGLSSSPGRLDYYYGLDVWGQGTTVTVSS

SEQ ID NO: 593 - protein, 5 aa, Homo sapiens
SYSMN

SEQ ID NO: 594 - protein, 17 aa, Homo sapiens
SISSSNAYIYSADSVKG

SEQ ID NO: 595 - protein, 20 aa, Homo sapiens
GGRGLSSSPGRLDYYYGLDV

SEQ ID NO: 596 - DNA, 327 bp, Homo sapiens
gacatccagatgacccagtctccaccctccctgtctgcatctgtaggagacagagtcaccatcacttgccgggcaagtcagagcattagcagctatttaaattggtatcagcagaaaccagggaaagcccctaagctcctgatctatgctgcatccagtttgcaaagtggggtcccatcaaggttcagtggcagtggatctgggacagatttcactctcaccatcagtagtctgcaacctgaagattttgcaacttattactgtcaacagagttacaatacccccccccccactttcggcggagggaccaaggtggagatcaaacga

SEQ ID NO: 597 - protein, 109 aa, Homo sapiens
DIQMTQSPPSLSASVGDRVTITCRASQSISSYLNWYQQKPGKAPKLLIYAASSLQSGVPSRFSGSGSGTDFTLTISSLQPEDFATYYCQQSYNTPPPTFGGGTKVEIKR

SEQ ID NO: 598 - protein, 11 aa, Homo sapiens
RASQSISSYLN

SEQ ID NO: 599 - protein, 7 aa, Homo sapiens
AASSLQS

SEQ ID NO: 600 - protein, 10 aa, Homo sapiens
QQSYNTPPPT

SEQ ID NO: 601 - DNA, 375 bp, Homo sapiens
gaggtgcagctggtggagtctgggggaggcctggtcaagcctggggggtccctgagactctcctgtgcagcctctggattcagcttcagtaactataacatgaactgggtccgccaggctccagggaaggggctggagtgggtctcatacattagtagtagtagtagttacatttactacgcagactcagtgaagggccgattcaccatctccagagacaacgccaagaactcactgtatctgcaaatgaacagcctgagaggcgaggacacggctgtgtattcctgtgcgagagaggcgagcggggcgtattactttgataggagtggatattttgactactggggccagggaaccctggtcaccgtctcccca

SEQ ID NO: 602 - protein, 125 aa, Homo sapiens
EVQLVESGGGLVKPGGSLRLSCAASGFSFSNYNMNWVRQAPGKGLEWVSYISSSSSYIYYADSVKGRFTISRDNAKNSLYLQMNSLRGEDTAVYSCAREASGAYYFDRSGYFDYWGQGTLVTVSP

SEQ ID NO: 603 - protein, 5 aa, Homo sapiens
NYNMN

SEQ ID NO: 604 - protein, 17 aa, Homo sapiens
YISSSSSYIYYADSVKG

SEQ ID NO: 605 - protein, 16 aa, Homo sapiens
EASGAYYFDRSGYFDY

SEQ ID NO: 606 - DNA, 324 bp, Homo sapiens
gacatccagatgacccagtctccttccaccctgtctgcatctgtaggagacagagtcaccatcacttgccgggccagtcagagtattagtagctggttggcctggtatcagcagaaaccagggaaagcccctaacctcctgatctataaggcatcaagtttagaaagtggggtcccatcaagattcagcggcagtggatctgggacagaattcactctcaccatcagcagcctgcagcctgatgattttgcaacttattactgccaacagtataatagttatccgtggacgttcggccaagggaccaaggtggaaatcaaacga

SEQ ID NO: 607 - protein, 108 aa, Homo sapiens
DIQMTQSPSTLSASVGDRVTITCRASQSISSWLAWYQQKPGKAPNLLIYKASSLESGVPSRFSGSGSGTEFTLTISSLQPDDFATYYCQQYNSYPWTFGQGTKVEIKR

SEQ ID NO: 608 - protein, 11 aa, Homo sapiens
RASQSISSWLA

SEQ ID NO: 609 - protein, 7 aa, Homo sapiens
KASSLES

SEQ ID NO: 610 - protein, 9 aa, Homo sapiens
QQYNSYPWT

SEQ ID NO: 611 - DNA, 390 bp, Homo sapiens
caggtgcagctgcaggagtcgggcccaggactggtgaagccttcggagaccctgtccctcacctgcactgtctctggtggctccatcagtagttactactggagctggatccgacagcccccagggaagggactggagtggattgggtatatctataacagtgggagtaccaactacaacccctccctcaagagtcgagtcaccatatcagtagacacgtccaagaaccagttctccctgaagctgagctctgtgaccgctgcggacacggccgtgtattactgtgcgagagcggcggggggttcctatgatagtagtggttattactccccttggtactactacggtatggacgtctggggccaagggaccacggtcaccgtctcctca

SEQ ID NO: 612 - protein, 130 aa, Homo sapiens
QVQLQESGPGLVKPSETLSLTCTVSGGSISSYYWSWIRQPPGKGLEWIGYIYNSGSTNYNPSLKSRVTISVDTSKNQFSLKLSSVTAADTAVYYCARAAGGSYDSSGYYSPWYYYGMDVWGQGTTVTVSS

SEQ ID NO: 613 - protein, 5 aa, Homo sapiens
SYYWS

SEQ ID NO: 614 - protein, 16 aa, Homo sapiens
YIYNSGSTNYNPSLKS

SEQ ID NO: 615 - protein, 22 aa, Homo sapiens
AAGGSYDSSGYYSPWYYYGMDV

SEQ ID NO: 616 - DNA, 333 bp, Homo sapiens
cagtctgtgctgactcagccaccctcagcgtctgggacccccgggcagagggtcaccatctcttgttctggaagcagctccaacatcggaagtaatactgtaaactggtaccagcagctcccaggaacggcccccaaactcctcgtctataataatagtcagcggccctcaggggtccctgaccgattctctggctccaagtctggcacctcagcctccctggccatcagtgggctccagtctgaggatgaggctgattattactgtgcagcatgggatgacagcctgaatggtccggtgttcggcggagggaccaagctgaccgtcctaggt

SEQ ID NO: 617 - protein, 111 aa, Homo sapiens
QSVLTQPPSASGTPGQRVTISCSGSSSNIGSNTVNWYQQLPGTAPKLLVYNNSQRPSGVPDRFSGSKSGTSASLAISGLQSEDEADYYCAAWDDSLNGPVFGGGTKLTVLG

SEQ ID NO: 618 - protein, 13 aa, Homo sapiens
SGSSSNIGSNTVN

SEQ ID NO: 619 - protein, 7 aa, Homo sapiens
NNSQRPS

SEQ ID NO: 620 - protein, 11 aa, Homo sapiens
AAWDDSLNGPV

SEQ ID NO: 621 - DNA, 372 bp, Homo sapiens
caggtgcagctgcaggagtcgggcccaggactggtgaagccttcggagaccctgtccctcacctgcagtgtctctggtggctccatcagtagttactactggagctggatccggcagcccccagggaagggactggagtggattggatatatctcttacagtgggagcacaaactacaacccctccctcaagagtcgagtcaccatatcagtagacacgtccaagaaccagttctccctgaagctgagctctgtgaccgccgcagacacggccgtatattactgtgcgagactggggttcggggggatttaccccagtctctatgatgcttttgatatctggggccaagggacaatggtcaccgtctcttca

SEQ ID NO: 622 - protein, 124 aa, Homo sapiens
QVQLQESGPGLVKPSETLSLTCSVSGGSISSYYWSWIRQPPGKGLEWIGYISYSGSTNYNPSLKSRVTISVDTSKNQFSLKLSSVTAADTAVYYCARLGFGGIYPSLYDAFDIWGQGTMVTVSS

SEQ ID NO: 623 - protein, 5 aa, Homo sapiens
SYYWS

SEQ ID NO: 624 - protein, 16 aa, Homo sapiens
YISYSGSTNYNPSLKS

SEQ ID NO: 625 - protein, 16 aa, Homo sapiens
LGFGGIYPSLYDAFDI

SEQ ID NO: 626 - DNA, 324 bp, Homo sapiens
gacatccagatgacccagtctccatcctccctgtctgcatctgtaggagacagagtcaccatcacttgccgggcaagtcagaccattagcagctatttaaattggtatcagcagaaaccagggaaagcccctaacctcctgatctatgatgcatccagtttgcaaaggggggtcccatcaaggttcagtggcagtggatctgggacagatttcactctcaccatcagcagtctgcaacctgaagattttgcaacttactactgtcaacagagttacagtacccctcgaacgttcggccaagggaccaaggtggaaatcaaacga

SEQ ID NO: 627 - protein, 108 aa, Homo sapiens
DIQMTQSPSSLSASVGDRVTITCRASQTISSYLNWYQQKPGKAPNLLIYDASSLQRGVPSRFSGSGSGTDFTLTISSLQPEDFATYYCQQSYSTPRTFGQGTKVEIKR

SEQ ID NO: 628 - protein, 11 aa, Homo sapiens
RASQTISSYLN

SEQ ID NO: 629 - protein, 7 aa, Homo sapiens
DASSLQR

SEQ ID NO: 630 - protein, 9 aa, Homo sapiens
QQSYSTPRT

SEQ ID NO: 631 - DNA, 375 bp, Homo sapiens
gaggtgcagctggtggagtctgggggaggcctggtcaagcctggggggtccctgagactctcctgtgcagcctctggattcaccttcagtgactgtaacatgaactgggtccgccaggctccagggaaggggctggagtgggtctcatccattagtagtagaagtagttacatttattacgcagactcagtgaagggccgattcaccatctccagagacaacgccaagaactctctgtatctgcaaatgaacagcctgagagccgaggacacggctgtgtattcctgtgcgagagaggcgagcggggcgtattactttgataggagtggttactttgactactggggccagggaaccctggtcaccgtctcccca

SEQ ID NO: 632 - protein, 125 aa, Homo sapiens
EVQLVESGGGLVKPGGSLRLSCAASGFTFSDCNMNWVRQAPGKGLEWVSSISSRSSYIYYADSVKGRFTISRDNAKNSLYLQMNSLRAEDTAVYSCAREASGAYYFDRSGYFDYWGQGTLVTVSP

SEQ ID NO: 633 - protein, 5 aa, Homo sapiens
DCNMN

SEQ ID NO: 634 - protein, 17 aa, Homo sapiens
SISSRSSYIYYADSVKG

SEQ ID NO: 635 - protein, 16 aa, Homo sapiens
EASGAYYFDRSGYFDY

SEQ ID NO: 636 - DNA, 324 bp, Homo sapiens
gacatccagatgacccagtctccttccaccctgtctgcatctgtaggagacagagtcaccatcacttgccgggccagtcagagtattagtagctggttggcctggtatcagcagaaaccagggaaagcccctaatctcctgatctataaggcatcaagtttagaaagtggggtcccatcaaggttcagcggcagtgggtctgggacagagttcactctcaccatcagcagcctgcagcctgatgattttgcaacttattactgccaacagtataatacttatccgtggacgttcggccaagggaccaaggtggaaatcaaacga

SEQ ID NO: 637 - protein, 108 aa, Homo sapiens
DIQMTQSPSTLSASVGDRVTITCRASQSISSWLAWYQQKPGKAPNLLIYKASSLESGVPSRFSGSGSGTEFTLTISSLQPDDFATYYCQQYNTYPWTFGQGTKVEIKR

SEQ ID NO: 638 - protein, 11 aa, Homo sapiens
RASQSISSWLA

SEQ ID NO: 639 - protein, 7 aa, Homo sapiens
KASSLES

SEQ ID NO: 640 - protein, 9 aa, Homo sapiens
QQYNTYPWT

SEQ ID NO: 641 - DNA, 378 bp, Homo sapiens
gaggtgcagctggtggagtctgggggaggcttggtccagcctggggggtccctgagactctcctgtgcagcctctggattcacctttaggagcttttggatgagctgggtccgccaggctccagggaaggggctggagtgggtggccaacataaaggaagatgccagtgagaaacactatgtggaccctgtgaagggccgattcaccatctccagagacaacgccaagaactcactgtatctgcaattgaacagcctgagagccgaggacatggccgtgtattactgcgcgagagttgggaggggatattgtactaatggtctgtgctatacagcttttgagtactggggccagggaaccctggtcaccgtctcctca

SEQ ID NO: 642 - protein, 126 aa, Homo sapiens
EVQLVESGGGLVQPGGSLRLSCAASGFTFRSFWMSWVRQAPGKGLEWVANIKEDASEKHYVDPVKGRFTISRDNAKNSLYLQLNSLRAEDMAVYYCARVGRGYCTNGLCYTAFEYWGQGTLVTVSS

SEQ ID NO: 643 - protein, 5 aa, Homo sapiens
SFWMS

SEQ ID NO: 644 - protein, 17 aa, Homo sapiens
NIKEDASEKHYVDPVKG

SEQ ID NO: 645 - protein, 17 aa, Homo sapiens
VGRGYCTNGLCYTAFEY

SEQ ID NO: 646 - DNA, 324 bp, Homo sapiens
gacatccagatgacccagtctccatcctccctgtctgcatctgtaggagacagagtcaccatcacttgccggacaagtcagagcattagcaactatttaaattggtatcagcagaaaccagggaaagccccaaagctcctgatctatgctgcatccagtttgcaaagtggggtcccatcaaggttcagtggcagtggatctgggacagatttcactctcaccatcagcagtctgcaacctgaagattttgcaacttattactgtcaacagagttacagtaccgcgtggacgttcggccaagggaccaaggtggaaatcagacga

SEQ ID NO: 647 - protein, 108 aa, Homo sapiens
DIQMTQSPSSLSASVGDRVTITCRTSQSISNYLNWYQQKPGKAPKLLIYAASSLQSGVPSRFSGSGSGTDFTLTISSLQPEDFATYYCQQSYSTAWTFGQGTKVEIRR

SEQ ID NO: 648 - protein, 11 aa, Homo sapiens
RTSQSISNYLN

SEQ ID NO: 649 - protein, 7 aa, Homo sapiens
AASSLQS

SEQ ID NO: 650 - protein, 9 aa, Homo sapiens
QQSYSTAWT

SEQ ID NO: 651 - DNA, 360 bp, Homo sapiens
caggtgcagctggtggagtctgggggaggcgtggtccagcctgggaggtccctgagactctcctgtgcagcgtctggattcaccttcagtagctatggcatgcactgggtccgccaggctccaggcaaggggctggagtgggtggcagttatatggtatgatggaagcaataaatactatgcagactccgtgaagggccgattcaccatctccagagacaattccaagaacacgctgtatctgcaaatgaacagcctgagagtcgaggacacggctgtgtattactgtgcgagagaggggcagttgggagctactgggcttgactgctggggccagggaaccctggtcagcgtctcctca

SEQ ID NO: 652 - protein, 120 aa, Homo sapiens
QVQLVESGGGVVQPGRSLRLSCAASGFTFSSYGMHWVRQAPGKGLEWVAVIWYDGSNKYYADSVKGRFTISRDNSKNTLYLQMNSLRVEDTAVYYCAREGQLGATGLDCWGQGTLVSVSS

SEQ ID NO: 653 - protein, 5 aa, Homo sapiens
SYGMH

SEQ ID NO: 654 - protein, 17 aa, Homo sapiens
VIWYDGSNKYYADSVKG

SEQ ID NO: 655 - protein, 11 aa, Homo sapiens
EGQLGATGLDC

SEQ ID NO: 656 - DNA, 327 bp, Homo sapiens
tcctatgagctgacacagccaccctcggtgtcagtgtccccaggacaaacggccaggatcacctgctctggagatgcattgccaaaaaaatatgcttattggtaccagcagaagtcaggccaggcccctgtgctggtcatctatgaggacagcaaacgaccctccgggatccctgagagattttctggctccagctcagggacaatggccaccttgactatcagtggggcccaggtggaggatgaagctgactactactgttactcaacagacaacagtggtaatcattgggtgttcggcggagggaccaagctgaccgtcctaggt

SEQ ID NO: 657 - protein, 109 aa, Homo sapiens
SYELTQPPSVSVSPGQTARITCSGDALPKKYAYWYQQKSGQAPVLVIYEDSKRPSGIPERFSGSSSGTMATLTISGAQVEDEADYYCYSTDNSGNHWVFGGGTKLTVLG

SEQ ID NO: 658 - protein, 11 aa, Homo sapiens
SGDALPKKYAY

SEQ ID NO: 659 - protein, 7 aa, Homo sapiens
EDSKRPS

SEQ ID NO: 660 - protein, 11 aa, Homo sapiens
YSTDNSGNHWV

SEQ ID NO: 661 - DNA, 363 bp, Homo sapiens
caggtgcagctggtggagtctgggggaggcgtggtccagcctgggaggtccctgagactctcctgtgcagcctctggattcaccttcagtagctatggcatgcactgggtccgccaggctccaggcaaggggctggagtgggtggcagttatatcatatgatggaagtaataaatactatgcagactccgtgaagggccgattcaccatctccagagacaattccaagaacacgctgtatctgcaaatgaacagcctgagagctgaggacacggctgtgtattactgtgcgaaaaccggaggcggatacagctatggtctaggtaatgtttggggccagggaaccctggtcaccgtctcctca

SEQ ID NO: 662 - protein, 121 aa, Homo sapiens
QVQLVESGGGVVQPGRSLRLSCAASGFTFSSYGMHWVRQAPGKGLEWVAVISYDGSNKYYADSVKGRFTISRDNSKNTLYLQMNSLRAEDTAVYYCAKTGGGYSYGLGNVWGQGTLVTVSS

SEQ ID NO: 663 - protein, 5 aa, Homo sapiens
SYGMH

SEQ ID NO: 664 - protein, 17 aa, Homo sapiens
VISYDGSNKYYADSVKG

SEQ ID NO: 665 - protein, 12 aa, Homo sapiens
TGGGYSYGLGNV

SEQ ID NO: 666 - DNA, 336 bp, Homo sapiens
cagtctgccctgactcagcctgcctccgtgtctgggtctcctggacagtcgatcaccatctcctgcactggaaccagcagtgacgttggtggttataactatgtctcctggtaccaacagcacccaggcaaagcccccaaactcatgatttatgatgtcagtaatcggccctcaggggtttctaatcgcttctctggctccaagtctggcaacacggcctccctgaccatctctgggctccaggctgaggacgaggctgattattactgcagctcatatacaagcagcagcactctcgtggtattcggcggagggaccaagctgaccgtcctaggt

SEQ ID NO: 667 - protein, 112 aa, Homo sapiens
QSALTQPASVSGSPGQSITISCTGTSSDVGGYNYVSWYQQHPGKAPKLMIYDVSNRPSGVSNRFSGSKSGNTASLTISGLQAEDEADYYCSSYTSSSTLVVFGGGTKLTVLG

SEQ ID NO: 668 - protein, 14 aa, Homo sapiens
TGTSSDVGGYNYVS

SEQ ID NO: 669 - protein, 7 aa, Homo sapiens
DVSNRPS

SEQ ID NO: 670 - protein, 11 aa, Homo sapiens
SSYTSSSTLVV

SEQ ID NO: 671 - DNA, 372 bp, Homo sapiens
caggtgcaggtacagcagtggggcgcgggactgttgaagccttcggagaccctgtccctcacctgcgctgtctatggtgggtccttcaataattactactggagctggatccgccagcccccagggaaggggctggagtggattggggaaatcaatcatagtggaagcaccaactacaacccgtccctcatgagtcgtgtcaccatatcagtggacacgtccaagaaccagttctccctgaagctgacctctgtgaccgccgcggacacggctgtgtatttctgtgcgagaggcctcccggtgactacttttttctcctcctactacggtatggacgtctggggccaagggaccacggtcaccgtctcctca

SEQ ID NO: 672 - protein, 124 aa, Homo sapiens
QVQVQQWGAGLLKPSETLSLTCAVYGGSFNNYYWSWIRQPPGKGLEWIGEINHSGSTNYNPSLMSRVTISVDTSKNQFSLKLTSVTAADTAVYFCARGLPVTTFFSSYYGMDVWGQGTTVTVSS

SEQ ID NO: 673 - protein, 5 aa, Homo sapiens
NYYWS

SEQ ID NO: 674 - protein, 16 aa, Homo sapiens
EINHSGSTNYNPSLMS

SEQ ID NO: 675 - protein, 16 aa, Homo sapiens
GLPVTTFFSSYYGMDV

SEQ ID NO: 676 - DNA, 327 bp, Homo sapiens
gaaattgtgttgacgcagtctccaggcaccctgtctttgtctccaggggaaagagccaccctctcctgcagggccagtcagagtgttagcagaacctacttagcctggtaccagcagaaacctggccaggctcccaggctcctcatctatggtgcatccagcagggccactggcatcccagacaggttcagtggcagtgggtctgggacagacttcactctcaccatcagcagactggagcctgaggattttgcagtttattactgtcagcactatggtagctcaccgtggacgttcggccaagggaccaaggtggagatcagacga

SEQ ID NO: 677 - protein, 109 aa, Homo sapiens
EIVLTQSPGTLSLSPGERATLSCRASQSVSRTYLAWYQQKPGQAPRLLIYGASSRATGIPDRFSGSGSGTDFTLTISRLEPEDFAVYYCQHYGSSPWTFGQGTKVEIRR

SEQ ID NO: 678 - protein, 12 aa, Homo sapiens
RASQSVSRTYLA

SEQ ID NO: 679 - protein, 7 aa, Homo sapiens
GASSRAT

SEQ ID NO: 680 - protein, 9 aa, Homo sapiens
QHYGSSPWT

SEQ ID NO: 681 - DNA, 375 bp, Homo sapiens
gaggtgcagctggtggagtctgggggaggcctggtcaagcctggggggtccctgagactctcctgtgcagcctctggattcaggttcagtgactataacatgaactgggtccgccaggctccagggaaggggctggagtgggtctcatacattagtagtagtagtagttacatttactacgcagactcagtgaagggccgattcaccatctccagagacaacgccaagaactccctgtatctgcaaatgaacagcctgagaggcgaggacacggctgtgtattcctgtgcgagagaggcgagcggggcgtattactttgataggagtggatattttgactactggggccagggaaccctggtcaccgtctcccca

SEQ ID NO: 682 - protein, 125 aa, Homo sapiens
EVQLVESGGGLVKPGGSLRLSCAASGFRFSDYNMNWVRQAPGKGLEWVSYISSSSSYIYYADSVKGRFTISRDNAKNSLYLQMNSLRGEDTAVYSCAREASGAYYFDRSGYFDYWGQGTLVTVSP

SEQ ID NO: 683 - protein, 5 aa, Homo sapiens
DYNMN

SEQ ID NO: 684 - protein, 17 aa, Homo sapiens
YISSSSSYIYYADSVKG

SEQ ID NO: 685 - protein, 16 aa, Homo sapiens
EASGAYYFDRSGYFDY

SEQ ID NO: 686 - DNA, 324 bp, Homo sapiens
gacatccagatgacccagtctccttccaccctgtctgcatctgtaggagacagagtcaccatcacttgccgggccagtcagagtattagtagctggttggcctggtatcagcagaaaccagggaaagcccctaacctcctgatctataaggcatcaagtttagaaagtggggtcccatcaagattcagcggcagtggatctgggacagaattcactctcaccatcagcagcctgcagccttatgattttgcaacttattactgccaacagtataatagttatccgtgggcgttcggccaagggaccaaggtggaaatgaaacga

SEQ ID NO: 687 - protein, 108 aa, Homo sapiens
DIQMTQSPSTLSASVGDRVTITCRASQSISSWLAWYQQKPGKAPNLLIYKASSLESGVPSRFSGSGSGTEFTLTISSLQPYDFATYYCQQYNSYPWAFGQGTKVEMKR

SEQ ID NO: 688 - protein, 11 aa, Homo sapiens
RASQSISSWLA

SEQ ID NO: 689 - protein, 7 aa, Homo sapiens
KASSLES

SEQ ID NO: 690 - protein, 9 aa, Homo sapiens
QQYNSYPWA

SEQ ID NO: 691 - DNA, 354 bp, Homo sapiens
caggagcagatggtggagtctgggggaggcgtggtccagcctgggaggtcgctgagactctcctgcgcagcgtctggattcaacttcagaaattatggcatgcactgggtccgccaggctcctggcaaggggctggagtgggtggcagttatatggtatgatggaagtcatcagtattatgcagactccgtgaagggccgattcaccatctccagagacaattccaagaagacgctatatttgcagatgaatagtgtgacaaccgacgacacggctgtgtattactgtacgagagatgtttctagccactactttgacttttggggccagggaaccctggtcaccgtctcctca

SEQ ID NO: 692 - protein, 118 aa, Homo sapiens
QEQMVESGGGVVQPGRSLRLSCAASGFNFRNYGMHWVRQAPGKGLEWVAVIWYDGSHQYYADSVKGRFTISRDNSKKTLYLQMNSVTTDDTAVYYCTRDVSSHYFDFWGQGTLVTVSS

SEQ ID NO: 693 - protein, 5 aa, Homo sapiens
NYGMH

SEQ ID NO: 694 - protein, 17 aa, Homo sapiens
VIWYDGSHQYYADSVKG

SEQ ID NO: 695 - protein, 9 aa, Homo sapiens
DVSSHYFDF

SEQ ID NO: 696 - DNA, 330 bp, Homo sapiens
cagtctgccctgactcagcctcgctcagtgtccgggtctcctggacagtcagtcaccatctcctgcactggaaccagcagtgatgttggtgattataactatgtctcctggtaccaacaacacccaggcagagcccccaaacttataatttatgatgtcattaagcggccctcaggggtcgctgatcgcttctctggctccaggtctggcaacacggcctccctgaccatctctgggctccaggctgaggatgaggctgattattactgctgctcatatgtagccaactctgtggtattcggcggagggaccaaggtgaccgtcctacgt

SEQ ID NO: 697 - protein, 110 aa, Homo sapiens
QSALTQPRSVSGSPGQSVTISCTGTSSDVGDYNYVSWYQQHPGRAPKLIIYDVIKRPSGVADRFSGSRSGNTASLTISGLQAEDEADYYCCSYVANSVVFGGGTKVTVLR

SEQ ID NO: 698 - protein, 14 aa, Homo sapiens
TGTSSDVGDYNYVS

SEQ ID NO: 699 - protein, 7 aa, Homo sapiens
DVIKRPS

SEQ ID NO: 700 - protein, 9 aa, Homo sapiens
CSYVANSVV

SEQ ID NO: 701 - DNA, 366 bp, Homo sapiens
gaggtgcagctggtggagtctgggggaggcttggtccagcctggggggtccctgagactctcctgtgcagtctctggattcacctttagaagcttttggatgagctgggtccgccagactccagggaaggggctggagtgggtggccaacataaaggaagatggaagtgagaaatactatgtggactccgtgaagggccgattcaccatctccagagacaacgccaagaactcactgtatctgcaaatgaacagcctgagagccgaggacacggccgtgtattactgtgcgagagagggtcggtgggagctacttggctttgcttttgatatctggggccaagggacaatggtcaccgtctcttca

SEQ ID NO: 702 - protein, 122 aa, Homo sapiens
EVQLVESGGGLVQPGGSLRLSCAVSGFTFRSFWMSWVRQTPGKGLEWVANIKEDGSEKYYVDSVKGRFTISRDNAKNSLYLQMNSLRAEDTAVYYCAREGRWELLGFAFDIWGQGTMVTVSS

SEQ ID NO: 703 - protein, 5 aa, Homo sapiens
SFWMS

SEQ ID NO: 704 - protein, 17 aa, Homo sapiens
NIKEDGSEKYYVDSVKG

SEQ ID NO: 705 - protein, 13 aa, Homo sapiens
EGRWELLGFAFDI

SEQ ID NO: 706 - DNA, 324 bp, Homo sapiens
gacatccagatgacccagtctccatcctccctgtctgcatctgtaggagacagagtcaccatcacttgccgggcaagtcagagcattagcaactatttaaattggtatcagcagaaaccagggaaagcccctaagctcctgatctatgctgcatccagtttgcaaagtggggtcccatcaaggttcagtggcagtggatctgggacagatttcactctcaccatcagcagtctgcaacctgaagattttgcaacttactactgtcaacagagttacagtacccctcgaacgttcggccgagggaccaaggtggaaatcaaacga

SEQ ID NO: 707 - protein, 108 aa, Homo sapiens
DIQMTQSPSSLSASVGDRVTITCRASQSISNYLNWYQQKPGKAPKLLIYAASSLQSGVPSRFSGSGSGTDFTLTISSLQPEDFATYYCQQSYSTPRTFGRGTKVEIKR

SEQ ID NO: 708 - protein, 11 aa, Homo sapiens
RASQSISNYLN

SEQ ID NO: 709 - protein, 7 aa, Homo sapiens
AASSLQS

SEQ ID NO: 710 - protein, 9 aa, Homo sapiens
QQSYSTPRT

SEQ ID NO: 711 - DNA, 360 bp, Homo sapiens
caggtgcagctggtggagtctgggggaggcgtggtccagcctgggaggtccctgagactctcctgtgcagcctctggattcaccttcagtacctatgctatgcactgggtccgccaggctccaggcaaggggctggagtgggtggcacttatatcatatgatggaagcaataaatactacgcagactccgtgaagggccgattcaccatctccagagacaattccaagaacacgctggatctgcaaatgaacagcctgagagctgaggacacggctgtgtattactgtgcgagatcgcttggcggttatagaacggggttcgactactggggccagggaaccctggtcaccgtctcctca

SEQ ID NO: 712 - protein, 120 aa, Homo sapiens
QVQLVESGGGVVQPGRSLRLSCAASGFTFSTYAMHWVRQAPGKGLEWVALISYDGSNKYYADSVKGRFTISRDNSKNTLDLQMNSLRAEDTAVYYCARSLGGYRTGFDYWGQGTLVTVSS

SEQ ID NO: 713 - protein, 5 aa, Homo sapiens
TYAMH

SEQ ID NO: 714 - protein, 17 aa, Homo sapiens
LISYDGSNKYYADSVKG

SEQ ID NO: 715 - protein, 11 aa, Homo sapiens
SLGGYRTGFDY

SEQ ID NO: 716 - DNA, 327 bp, Homo sapiens
gacatccagttgacccagtctccatccttcctgtctgcatctgtaggagacagagtcaccatcacttgccgggccagtcagggcattagcagttatttagcctggtatcagcaaaaaccagggaaagcccctaagctcctgatctatgctgcatccactttgcaaagtggggtcccatcaaggttcagcggcagtggatctgggacagaattcactctcacaatcagcagcctgcagcctgaagattttgcaacttattactgtcaacagcttaatagttaccctccgttcactttcggccctgggaccaaagtggatatcaaacga

SEQ ID NO: 717 - protein, 109 aa, Homo sapiens
DIQLTQSPSFLSASVGDRVTITCRASQGISSYLAWYQQKPGKAPKLLIYAASTLQSGVPSRFSGSGSGTEFTLTISSLQPEDFATYYCQQLNSYPPFTFGPGTKVDIKR

SEQ ID NO: 718 - protein, 11 aa, Homo sapiens
RASQGISSYLA

SEQ ID NO: 719 - protein, 7 aa, Homo sapiens
AASTLQS

SEQ ID NO: 720 - protein, 10 aa, Homo sapiens
QQLNSYPPFT

SEQ ID NO: 721 - DNA, 375 bp, Homo sapiens
caggtgcagctgcaggagtcgggcccaggactggtgaagccttcggagaccctgtccctcacctgcactgtctctggtggctccatccgtagttactactggagctggatccggcagcccccaggaaagggactggagtggattggctatatctattacagtgggagcaccaactacagcccctccctcaagagtcgagtcaccatatcagtggacacgtccaagaaccagttctccctgaagctgaactctgtgaccgccgcagacacggccgtgtattactgtgcgagacgaggactaggatattgtagtggtgatagctgctccaatgcttttgatatctggggccaagggacaatggtcaccgtctcttca

SEQ ID NO: 722 - protein, 125 aa, Homo sapiens
QVQLQESGPGLVKPSETLSLTCTVSGGSIRSYYWSWIRQPPGKGLEWIGYIYYSGSTNYSPSLKSRVTISVDTSKNQFSLKLNSVTAADTAVYYCARRGLGYCSGDSCSNAFDIWGQGTMVTVSS

SEQ ID NO: 723 - protein, 5 aa, Homo sapiens
SYYWS

SEQ ID NO: 724 - protein, 16 aa, Homo sapiens
YIYYSGSTNYSPSLKS

SEQ ID NO: 725 - protein, 17 aa, Homo sapiens
RGLGYCSGDSCSNAFDI

SEQ ID NO: 726 - DNA, 324 bp, Homo sapiens
gacatccagatgacccagtctccatcctccctgtctgcatctgtaggagacagagtcaccatcacttgccgggcaagtcagagcattagcagctatttaaattggtatcagcagaaaccagggagagcccctgagctcctgatctatgatgcatccagtttgcaaagtggggtcccatcagggttcagtggcagtggatctgggacagatttcactctcaccatcagcagtctgcaacctgaggattttgcaacttactactgtcaacagagttacagtaccccattcactttcggccctgggaccaaagtggatatcaaacga

SEQ ID NO: 727 - protein, 108 aa, Homo sapiens
DIQMTQSPSSLSASVGDRVTITCRASQSISSYLNWYQQKPGRAPELLIYDASSLQSGVPSGFSGSGSGTDFTLTISSLQPEDFATYYCQQSYSTPFTFGPGTKVDIKR

SEQ ID NO: 728 - protein, 11 aa, Homo sapiens
RASQSISSYLN

SEQ ID NO: 729 - protein, 7 aa, Homo sapiens
DASSLQS

SEQ ID NO: 730 - protein, 9 aa, Homo sapiens
QQSYSTPFT

SEQ ID NO: 731 - DNA, 363 bp, Homo sapiens
caggtgcagctggtggagtctgggggaggcgtggtccagcctgggaggtccctgagactctcctgtgcagcgtctggattcaccttcagtagctatggcatgcactgggtccgccaggctccaggcaaggggctggagtgggtggcagttatatggtatgatggaagtaataaatactatgcagactccgtgaagggccgattcaccatctccagagacaattccaagaacacgctgtatctgcaaatgaacagcctgagagccgaggacacggctgtgtattactgtgcgagagacccccttggagcagtggctggttactttgactactggggccagggaaccctggtcaccgtctcctca

SEQ ID NO: 732 - protein, 121 aa, Homo sapiens
QVQLVESGGGVVQPGRSLRLSCAASGFTFSSYGMHWVRQAPGKGLEWVAVIWYDGSNKYYADSVKGRFTISRDNSKNTLYLQMNSLRAEDTAVYYCARDPLGAVAGYFDYWGQGTLVTVSS

SEQ ID NO: 733 - protein, 5 aa, Homo sapiens
SYGMH

SEQ ID NO: 734 - protein, 17 aa, Homo sapiens
VIWYDGSNKYYADSVKG

SEQ ID NO: 735 - protein, 12 aa, Homo sapiens
DPLGAVAGYFDY

SEQ ID NO: 736 - DNA, 330 bp, Homo sapiens
tcctatgtgctgactcagccaccctcggtgtcagtggccccaggacagacggccaggattacctgtgggggaaacaacattggaagtaaaagtgtgcactggtaccagcagaagccaggccaggcccctgtgctggtcgtctatgatgatagcgaccggccctcagggatccctgagcgattctctggctccaactctgggaacacggccaccctgaccatcagcagggtcgaagccggggatgaggccgactattactgtcaggtgtgggatagtagtagtgatcatcattgggtgttcggcggagggaccaagctgaccgtcctaggt

SEQ ID NO: 737 - protein, 110 aa, Homo sapiens
SYVLTQPPSVSVAPGQTARITCGGNNIGSKSVHWYQQKPGQAPVLVVYDDSDRPSGIPERFSGSNSGNTATLTISRVEAGDEADYYCQVWDSSSDHHWVFGGGTKLTVLG

SEQ ID NO: 738 - protein, 11 aa, Homo sapiens
GGNNIGSKSVH

SEQ ID NO: 739 - protein, 7 aa, Homo sapiens
DDSDRPS

SEQ ID NO: 740 - protein, 12 aa, Homo sapiens
QVWDSSSDHHWV

SEQ ID NO: 741 - DNA, 375 bp, Homo sapiens
caggtgcagctacagcagtggggcgcaggactgttgaagccttcggagaccctgtccctcacctgcgctgtctatggtgggtccttcagtggttactactggagctggatccgccagcccccagggaaggggctggagtggattggggaaatcaatcatagtggaaacaccacctacaacccgtccctcaagagtcgagtcaccatatcagtagacacgtccaagaaccagttctccctgaagctgagctctgtgaccgccgcggacacggctgtgtattactgtgcgagaggcctcgtaatcacgtattactatgatagtagtggcaagccgttcgacccctggggccagggaaccctggtcaccgtctcctca

SEQ ID NO: 742 - protein, 125 aa, Homo sapiens
QVQLQQWGAGLLKPSETLSLTCAVYGGSFSGYYWSWIRQPPGKGLEWIGEINHSGNTTYNPSLKSRVTISVDTSKNQFSLKLSSVTAADTAVYYCARGLVITYYYDSSGKPFDPWGQGTLVTVSS

SEQ ID NO: 743 - protein, 5 aa, Homo sapiens
GYYWS

SEQ ID NO: 744 - protein, 16 aa, Homo sapiens
EINHSGNTTYNPSLKS

SEQ ID NO: 745 - protein, 17 aa, Homo sapiens
GLVITYYYDSSGKPFDP

SEQ ID NO: 746 - DNA, 327 bp, Homo sapiens
gaaatagtgatgacgcagtctccagccaccctgtctgtgtctccaggggaaagagccaccctctcctgcagggccagtcagagtgttagcagcaacttagcctggtaccagcagaaacctggccaggctcccaggctcctcatctatggtgcatccaccagggccactggtatcccagccaggttcagtggcagtgggtctgggacagagttcactctcaccatcagcagcctgcagtctgaagattttgcagtttattactgtcagcagtataataactggcctccgatcaccttcggccaagggacacgactggagattaaacga

SEQ ID NO: 747 - protein, 109 aa, Homo sapiens
EIVMTQSPATLSVSPGERATLSCRASQSVSSNLAWYQQKPGQAPRLLIYGASTRATGIPARFSGSGSGTEFTLTISSLQSEDFAVYYCQQYNNWPPITFGQGTRLEIKR

SEQ ID NO: 748 - protein, 11 aa, Homo sapiens
RASQSVSSNLA

SEQ ID NO: 749 - protein, 7 aa, Homo sapiens
GASTRAT

SEQ ID NO: 750 - protein, 10 aa, Homo sapiens
QQYNNWPPIT

SEQ ID NO: 751 - DNA, 348 bp, Homo sapiens
gaggtgcaactggtggaggctgggggagacttggtccagcctggggggtccctgagactctcctgttcagcctctggattcaccttcactagttattctatccactgggtccgccaggctccagggaagggactggaatatgtttcaacaatttctcatggaggggacatcacagacttcgcagactccgtgaagggcagattcaccatctccagagacaactcggagaacacggtgtatcttcaaatgagcagtctgagacctgaagacacggctgtgtattactgtgcccgaagtaacttctggcttgactactggggccagggaaccctggttaccgtctcctca

SEQ ID NO: 752 - protein, 116 aa, Homo sapiens
EVQLVEAGGDLVQPGGSLRLSCSASGFTFTSYSIHWVRQAPGKGLEYVSTISHGGDITDFADSVKGRFTISRDNSENTVYLQMSSLRPEDTAVYYCARSNFWLDYWGQGTLVTVSS

SEQ ID NO: 753 - protein, 5 aa, Homo sapiens
SYSIH

SEQ ID NO: 754 - protein, 17 aa, Homo sapiens
TISHGGDITDFADSVKG

SEQ ID NO: 755 - protein, 7 aa, Homo sapiens
SNFWLDY

SEQ ID NO: 756 - DNA, 327 bp, Homo sapiens
aaaatagtgatgacgcagtctccagccaccctgtctgtgtctccaggggatagtgccaccctctcctgcagggccagtcagagtgttagcagcaacttggcctggtaccagcagaaacctggccaggctcccaggctcctcatctctggtgcattcaccagggccactggtatcccagccaggttcagtggcagtgggtctgggacagagttcactctcaccatcagcagcctgcagtctgaagattttgccgtttattactgtctgcagtataataactggcctctgtacacctttggccaggggaccaagctggagatcaaacga

SEQ ID NO: 757 - protein, 109 aa, Homo sapiens
KIVMTQSPATLSVSPGDSATLSCRASQSVSSNLAWYQQKPGQAPRLLISGAFTRATGIPARFSGSGSGTEFTLTISSLQSEDFAVYYCLQYNNWPLYTFGQGTKLEIKR

SEQ ID NO: 758 - protein, 11 aa, Homo sapiens
RASQSVSSNLA

SEQ ID NO: 759 - protein, 7 aa, Homo sapiens
GAFTRAT

SEQ ID NO: 760 - protein, 10 aa, Homo sapiens
LQYNNWPLYT

SEQ ID NO: 761 - DNA, 360 bp, Homo sapiens
gaggtgcagctggtggagtccgggggaggcttagttcagcctggggggtccctgagactctcctgtgcagcctctggattcaccttcactacttactggatgcactgggtccgccaagctccagggaaggggctggtgtgggtctcacgtattaaaactgatgggagtagcacaaactacgcggactccgtgaagggccgattcaccatctccagagacaacgccaagaacatgttgtatctgcaaatgaacagtctgagagccgaggacacggctgtgtattactgtgcaagagaagggcccgttagtatcgtgtactttgactactggggccagggaaccctggtcaccgtctcctca

SEQ ID NO: 762 - protein, 120 aa, Homo sapiens
EVQLVESGGGLVQPGGSLRLSCAASGFTFTTYWMHWVRQAPGKGLVWVSRIKTDGSSTNYADSVKGRFTISRDNAKNMLYLQMNSLRAEDTAVYYCAREGPVSIVYFDYWGQGTLVTVSS

SEQ ID NO: 763 - protein, 5 aa, Homo sapiens
TYWMH

SEQ ID NO: 764 - protein, 17 aa, Homo sapiens
RIKTDGSSTNYADSVKG

SEQ ID NO: 765 - protein, 11 aa, Homo sapiens
EGPVSIVYFDY

SEQ ID NO: 766 - DNA, 321 bp, Homo sapiens
tcctatgagctgactcagccaccctcagtgtccgtgtccccaggacagacagccatcatcacctgctctggagataaattgggggataaatatgcttgctggtatcagcagaagccaggccagtcccctgtactggtcatctatcaagataacaagcggccctcagggatccctgagcgattctctggctccaactctgggaacacagccactctgaccatcagcgggacccaggctatggatgaggctgactattactgtcaggcgtgggacagcagcactgaagtgttcggcggagggaccaagctgaccgtcctaggt

SEQ ID NO: 767 - protein, 107 aa, Homo sapiens
SYELTQPPSVSVSPGQTAIITCSGDKLGDKYACWYQQKPGQSPVLVIYQDNKRPSGIPERFSGSNSGNTATLTISGTQAMDEADYYCQAWDSSTEVFGGGTKLTVLG

SEQ ID NO: 768 - protein, 11 aa, Homo sapiens
SGDKLGDKYAC

SEQ ID NO: 769 - protein, 7 aa, Homo sapiens
QDNKRPS

SEQ ID NO: 770 - protein, 9 aa, Homo sapiens
QAWDSSTEV

SEQ ID NO: 771 - DNA, 369 bp, Homo sapiens
caggtgcagctacaggagtcgggcccaggactggtgaagccttcggagaccctgtccctcacctgcactgtctctggtggctccatcagcaatactagttactactggggctggatccgccagcccccagggaaggggctggagtggattgggagtatctatcgtagtgggagcacctactacaacccgtccctcaagagtcgagtcaccatatcaatagacacgtccaagaatcagttcaccctgaagctgagctctgtgacggccgcggacacggccgtgtattactgtgcgagagattattacggtgactactcggcgaaacccatggagtactggggccagggaaccctggtcaccgtctcttca

SEQ ID NO: 772 - protein, 123 aa, Homo sapiens
QVQLQESGPGLVKPSETLSLTCTVSGGSISNTSYYWGWIRQPPGKGLEWIGSIYRSGSTYYNPSLKSRVTISIDTSKNQFTLKLSSVTAADTAVYYCARDYYGDYSAKPMEYWGQGTLVTVSS

SEQ ID NO: 773 - protein, 7 aa, Homo sapiens
NTSYYWG

SEQ ID NO: 774 - protein, 16 aa, Homo sapiens
SIYRSGSTYYNPSLKS

SEQ ID NO: 775 - protein, 13 aa, Homo sapiens
DYYGDYSAKPMEY

SEQ ID NO: 776 - DNA, 330 bp, Homo sapiens
cagtctgccctgactcagcctcgctcagtgtccgggtctcctggacagtcagtcaccatctcctgcactggaaccagcagtgatgttggtggttataactatgtctcctggtaccaacagcacccaggcaaagcccccaaactcctgatttatgatgtcagtaagcggccctcaggggtccctgatcgcttctctggctccaagtctggcaacacggcctccctgaccatctctgggctccaggctgaggatgaggctgattattactgctgctcatatgcaggcagctacgtggtattcggcggaggggccaagctgaccgtcctaggt

SEQ ID NO: 777 - protein, 110 aa, Homo sapiens
QSALTQPRSVSGSPGQSVTISCTGTSSDVGGYNYVSWYQQHPGKAPKLLIYDVSKRPSGVPDRFSGSKSGNTASLTISGLQAEDEADYYCCSYAGSYVVFGGGAKLTVLG

SEQ ID NO: 778 - protein, 14 aa, Homo sapiens
TGTSSDVGGYNYVS

SEQ ID NO: 779 - protein, 7 aa, Homo sapiens
DVSKRPS

SEQ ID NO: 780 - protein, 9 aa, Homo sapiens
CSYAGSYVV

SEQ ID NO: 781 - DNA, 351 bp, Homo sapiens
gaggtgcagctggtggagtctgggggaggcgtggtccagcctgggaggtccctgagactctcctgtgcagcctctggattcaccctcagtagttatggcatgcactgggtccgtcaggctccaggcaaggggctggagtgggtggcagttatatcatatgagggaagtaataaacactatgcagactccgtgaagggccgattcaccatctccagagacaattccaagaacacgctgtatctgcaaatgaacagcctgagagctgaggacacggctgtctattactgtgcgaaaggtagtactaactactttgaccactggggccagggaaccctggtcaccgtctcctca

SEQ ID NO: 782 - protein, 117 aa, Homo sapiens
EVQLVESGGGVVQPGRSLRLSCAASGFTLSSYGMHWVRQAPGKGLEWVAVISYEGSNKHYADSVKGRFTISRDNSKNTLYLQMNSLRAEDTAVYYCAKGSTNYFDHWGQGTLVTVSS

SEQ ID NO: 783 - protein, 5 aa, Homo sapiens
SYGMH

SEQ ID NO: 784 - protein, 17 aa, Homo sapiens
VISYEGSNKHYADSVKG

SEQ ID NO: 785 - protein, 8 aa, Homo sapiens
GSTNYFDH

SEQ ID NO: 786 - DNA, 342 bp, Homo sapiens
gatgttgtgatgactcagtctccactctccctgcccgtcacccttggacagccggcctccatctcctgcaggtctagtcaaagcctcgtatacagtgatggaaacacctacttgaattggtttcagcagaggccaggccaatctccaaggcgcctaatttataaggtttctaaccgggactctggggtcccagacagattcagcggcagtgggtcaggcactgatttcacactgaaaatcagcagggtggaggctgaggatgttggggtttattactgcatgcaaggtacacactggcctccgatcaccttcggccaagggacacgactggagattaaacga

SEQ ID NO: 787 - protein, 114 aa, Homo sapiens
DVVMTQSPLSLPVTLGQPASISCRSSQSLVYSDGNTYLNWFQQRPGQSPRRLIYKVSNRDSGVPDRFSGSGSGTDFTLKISRVEAEDVGVYYCMQGTHWPPITFGQGTRLEIKR

SEQ ID NO: 788 - protein, 16 aa, Homo sapiens
RSSQSLVYSDGNTYLN

SEQ ID NO: 789 - protein, 7 aa, Homo sapiens
KVSNRDS

SEQ ID NO: 790 - protein, 10 aa, Homo sapiens
MQGTHWPPIT

SEQ ID NO: 791 - DNA, 381 bp, Homo sapiens; identical to SEQ ID NO: 431

SEQ ID NO: 792 - protein, 127 aa, Homo sapiens; identical to SEQ ID NO: 432

SEQ ID NO: 793 - protein, 5 aa, Homo sapiens
IYGMH

SEQ ID NO: 794 - protein, 17 aa, Homo sapiens
LISYDGTNKYYADSVKG

SEQ ID NO: 795 - protein, 18 aa, Homo sapiens
VLMMGDSSGFSLGDAFDI

SEQ ID NO: 796 - DNA, 324 bp, Homo sapiens
gacatccagatgacccagtctccatcttccgtgtctgcatctgtaggagacagagtcaccatcacttgtcgggcgagtcagggtattagcaactggttagcctggtatcagcagaaaccagggaaagcccctaagctcctgatctatgctgcatccagtttgcaaagtggggtcccatcaaggttcagcggcagtgtatctgggacagatttcactctcaccatcagcagcctgcagcctgaagattttgcaacttactattgtcaacaggctaacagtttccctctcactttcggcggagggaccaaggtggacatcaaacga

SEQ ID NO: 797 - protein, 108 aa, Homo sapiens
DIQMTQSPSSVSASVGDRVTITCRASQGISNWLAWYQQKPGKAPKLLIYAASSLQSGVPSRFSGSVSGTDFTLTISSLQPEDFATYYCQQANSFPLTFGGGTKVDIKR

SEQ ID NO: 798 - protein, 11 aa, Homo sapiens
RASQGISNWLA

SEQ ID NO: 799 - protein, 7 aa, Homo sapiens
AASSLQS

SEQ ID NO: 800 - protein, 9 aa, Homo sapiens
QQANSFPLT

SEQ ID NO: 801 - DNA, 378 bp, Homo sapiens
gaggtgcagctggtggagtccgggggaggcttagttcagcctggggggtccctgagactgtcctgtacagcctctggattcaccttcaataacaattggatgcactgggtccgccaagtcccagggaaggggctggtgtgggtctctcgtattaacactgatgaaagtagtacaagttacgcggactccgtgaagggccgattcatcatctccagagacaacgccaagaatacactgtatctgcaaatgaacagtctgagagtcgaggacacggctgtgtattattgtgcaagatccacggcccagtacgatatttggactggttattactactacatggacgtctggggcaaagggaccacggtcaccgtctcctca

SEQ ID NO: 802 - protein, 126 aa, Homo sapiens
EVQLVESGGGLVQPGGSLRLSCTASGFTFNNNWMHWVRQVPGKGLVWVSRINTDESSTSYADSVKGRFIISRDNAKNTLYLQMNSLRVEDTAVYYCARSTAQYDIWTGYYYYMDVWGKGTTVTVSS

SEQ ID NO: 803 - protein, 5 aa, Homo sapiens
NNWMH

SEQ ID NO: 804 - protein, 17 aa, Homo sapiens
RINTDESSTSYADSVKG

SEQ ID NO: 805 - protein, 17 aa, Homo sapiens
STAQYDIWTGYYYYMDV

SEQ ID NO: 806 - DNA, 324 bp, Homo sapiens
gacatccagatgacccagtctccttccaccctgtctgcatctgttggagacagagtcaccatcagttgccgggccagtcagagtattagtacgtggttggcctggtatcaacagaaaccagggaaagcccctaacctcctgatctatggggcatcaaatttggggagtggggtcccatcaaggttcagcggcggtggatctgggacagaattcactctcactatcagcagcctgcagtctgatgattttgcaacttattactgccagcggtataatagttttccgtatacttttggccaggggaccaagctggagatcaaacga

SEQ ID NO: 807 - protein, 108 aa, Homo sapiens
DIQMTQSPSTLSASVGDRVTISCRASQSISTWLAWYQQKPGKAPNLLIYGASNLGSGVPSRFSGGGSGTEFTLTISSLQSDDFATYYCQRYNSFPYTFGQGTKLEIKR

SEQ ID NO: 808 - protein, 11 aa, Homo sapiens
RASQSISTWLA

SEQ ID NO: 809 - protein, 7 aa, Homo sapiens
GASNLGS

SEQ ID NO: 810 - protein, 9 aa, Homo sapiens
QRYNSFPYT

SEQ ID NO: 811 - DNA, 372 bp, Homo sapiens
caggtgcagctgcaggagtcgggcccagggctggtgaagccttcggagaccctgtccctcacgtgcagtgtctctggtttcgccattaccaacggtttcgactggggctggatccggcagcccccaagattggggctggaatggattgggactgtcttccatactggggttacctactccaacccgtccctcaagagtcggctcagcacatcagtcgacacgtccaagaaccagttctccatgacgctgaactctgtgaccgccgcagacacgggcatttactattgtgtgagagttcagtcgggtttagaggctcgggccatgtctttctttgactactggggccagggaatgttggtcagcgtctcatct

SEQ ID NO: 812 - protein, 124 aa, Homo sapiens
QVQLQESGPGLVKPSETLSLTCSVSGFAITNGFDWGWIRQPPRLGLEWIGTVFHTGVTYSNPSLKSRLSTSVDTSKNQFSMTLNSVTAADTGIYYCVRVQSGLEARAMSFFDYWGQGMLVSVSS

SEQ ID NO: 813 - protein, 6 aa, Homo sapiens
NGFDWG

SEQ ID NO: 814 - protein, 16 aa, Homo sapiens
TVFHTGVTYSNPSLKS

SEQ ID NO: 815 - protein, 15 aa, Homo sapiens
VQSGLEARAMSFFDY

SEQ ID NO: 816 - DNA, 339 bp, Homo sapiens
gacatcgtgatgacccagtctccagactccctggctgtgtctctgggcgagagggccaccatcaactgcaagtccagccagaatgttttatacagctccaacaataagaactccttagcttggtaccagcagaaaccaggacagcctcctaaggtgctcatttactgggcatctacccgggtatccggggtccctgaccgattcattggcagcgggtctgggacagatttcactctcaccatcagcagcctgcaggctgaagatgtggcagtttattactgtcaacaatattctagtagtatcactttcggccctgggaccaaagtggaagtcaaacga

SEQ ID NO: 817 - protein, 113 aa, Homo sapiens
DIVMTQSPDSLAVSLGERATINCKSSQNVLYSSNNKNSLAWYQQKPGQPPKVLIYWASTRVSGVPDRFIGSGSGTDFTLTISSLQAEDVAVYYCQQYSSSITFGPGTKVEVKR

SEQ ID NO: 818 - protein, 17 aa, Homo sapiens
KSSQNVLYSSNNKNSLA

SEQ ID NO: 819 - protein, 7 aa, Homo sapiens
WASTRVS

SEQ ID NO: 820 - protein, 8 aa, Homo sapiens
QQYSSSIT

SEQ ID NO: 821 - DNA, 393 bp, Homo sapiens
caggtgcagctgcaggagtcgggcccaggactggtgaagccttcggagaccctgtccctcacctgcactgtctctggtggctccatcagtagttactcctggagctggatccggcagcccccagggaagggactggagtggattgggtatatctattacagtgggagcaccaactacaacccctccctcaagagtcgagtcaccatatcagtagacacgtccaagaaccagttctccctgaagctgagctctgtgaccgctgcggacacggccgtgtattactgtgcgagagagtccatgggaagatatagcctagaactacgtcaacccgagtcggcctttgactactggggccggggaaccctggtcaccgtctcctcagcctccaccaag

SEQ ID NO: 822 - protein, 131 aa, Homo sapiens
QVQLQESGPGLVKPSETLSLTCTVSGGSISSYSWSWIRQPPGKGLEWIGYIYYSGSTNYNPSLKSRVTISVDTSKNQFSLKLSSVTAADTAVYYCARESMGRYSLELRQPESAFDYWGRGTLVTVSSASTK

SEQ ID NO: 823 - protein, 5 aa, Homo sapiens
SYSWS

SEQ ID NO: 824 - protein, 16 aa, Homo sapiens
YIYYSGSTNYNPSLKS

SEQ ID NO: 825 - protein, 19 aa, Homo sapiens
ESMGRYSLELRQPESAFDY

SEQ ID NO: 826 - DNA, 324 bp, Homo sapiens
gacatccagatgacccagtctccatcctccctgtctgcatctgtaggagacagagtcaccatcacttgccgggcaagtcagagcattagcagctatttaaattggtatcagcagaaaccagggaaagcccctaagctcctgatctattctgcatccagtttgcaaagtggggtcccatcaaggttcagtggcagtggatctgggacagatttcactctcaccatcagcagtctgcaacctgaagattttgcaacttactactgtcaacagacttacagtacccctcggacttttggccaggggaccaagctggagatcagacga

SEQ ID NO: 827 - protein, 108 aa, Homo sapiens
DIQMTQSPSSLSASVGDRVTITCRASQSISSYLNWYQQKPGKAPKLLIYSASSLQSGVPSRFSGSGSGTDFTLTISSLQPEDFATYYCQQTYSTPRTFGQGTKLEIRR

SEQ ID NO: 828 - protein, 11 aa, Homo sapiens
RASQSISSYLN

SEQ ID NO: 829 - protein, 7 aa, Homo sapiens
SASSLQS

SEQ ID NO: 830 - protein, 9 aa, Homo sapiens
QQTYSTPRT

SEQ ID NO: 831 - DNA, 381 bp, Homo sapiens
gaagtgcagctggtggagtcagggggaggcttggtccagcctggggggtccctgagactctcctgtgcagcctctggatttatgtttaataggttttggatgagctgggtccgccaggctccagggaaggggctggagtgggtgaccaacataaagcaagatgggagtgagaaaaactatgtggactctgtgaagggccgattcaccatctccagagacaacgccaagaactcactgtatctgcaaatgaacagcctgagagccgaggacacggctgtgtattactgtgcgagagatggattgtattacgattttcggagtccctcccctttttacggtatggacgtctggggccaagggaccacggtcaccgtctcctca

SEQ ID NO: 832 - protein, 127 aa, Homo sapiens
EVQLVESGGGLVQPGGSLRLSCAASGFMFNRFWMSWVRQAPGKGLEWVTNIKQDGSEKNYVDSVKGRFTISRDNAKNSLYLQMNSLRAEDTAVYYCARDGLYYDFRSPSPFYGMDVWGQGTTVTVSS

SEQ ID NO: 833 - protein, 5 aa, Homo sapiens
RFWMS

SEQ ID NO: 834 - protein, 17 aa, Homo sapiens
NIKQDGSEKNYVDSVKG

SEQ ID NO: 835 - protein, 18 aa, Homo sapiens
DGLYYDFRSPSPFYGMDV

SEQ ID NO: 836 - DNA, 324 bp, Homo sapiens
gacatccagatgacccagtctccatcctccctgtctgcatctgtaggagacagagtcaccatcacttgccgggcaagtcagagcattagcagctatttaaattggtatcagcacaaatcagggaaagcccctaagctcctgatctatgctgcatccaggttgcaaagtggggtcccatcaaggttcagtggcagtggatctgggacagatttcactctcaccatcgtcagtctgcaacctgaagatttggcaacttactactgtcaacagagttacagtacccctcgtactttcggcggagggaccaaggtggagatcaaacga

SEQ ID NO: 837 - protein, 108 aa, Homo sapiens
DIQMTQSPSSLSASVGDRVTITCRASQSISSYLNWYQHKSGKAPKLLIYAASRLQSGVPSRFSGSGSGTDFTLTIVSLQPEDLATYYCQQSYSTPRTFGGGTKVEIKR

SEQ ID NO: 838 - protein, 11 aa, Homo sapiens
RASQSISSYLN

SEQ ID NO: 839 - protein, 7 aa, Homo sapiens
AASRLQS

SEQ ID NO: 840 - protein, 9 aa, Homo sapiens
QQSYSTPRT

SEQ ID NO: 841 - DNA, 375 bp, Homo sapiens
gaggtgcagctggtggagtctgggggaggcctggtcaagcctggggggtccctgagactctcctgtgcagcctctggattcaccttcagtagttataccatgaactgggtccgccaggctccagggaaggggctggagtgggtctcatccattagtagtggtagtagtttcatatactacgcagactcactgaggggccgattcaccatctccagagacaacgccaagaactcactgtatctgcaaatgaacagcctgagagccgaggacacggctgtgtattactgtgcgagagccccggaaccccaaagtgtgatctacgcctactggtacttcgatctctggggccgtggcaccctggtcactgtctcctca

SEQ ID NO: 842 - protein, 125 aa, Homo sapiens
EVQLVESGGGLVKPGGSLRLSCAASGFTFSSYTMNWVRQAPGKGLEWVSSISSGSSFIYYADSLRGRFTISRDNAKNSLYLQMNSLRAEDTAVYYCARAPEPQSVIYAYWYFDLWGRGTLVTVSS

SEQ ID NO: 843 - protein, 5 aa, Homo sapiens
SYTMN

SEQ ID NO: 844 - protein, 17 aa, Homo sapiens
SISSGSSFIYYADSLRG

SEQ ID NO: 845 - protein, 16 aa, Homo sapiens
APEPQSVIYAYWYFDL

SEQ ID NO: 846 - DNA, 336 bp, Homo sapiens
cagtctgccctgactcagcctgcctccgtgtctgggtctcctggacagtcgatcaccttctcctgcactggaaccagcagtgatgttgggagttataaccttgtctcctggtaccaacagtacccaggcaaagcccccaaactcatgatttatgaggtcaataagcggccctcaggggtttctaatcgcttctctggctccaagtctggcaacacggcctccctgacaatctctgggctccaggctgaggacgaggctgattattactgctgctcatatgcaggtagtagcactttttatgtcttcggaactgggaccaaggtcaccgtcctaggt

SEQ ID NO: 847 - protein, 112 aa, Homo sapiens
QSALTQPASVSGSPGQSITFSCTGTSSDVGSYNLVSWYQQYPGKAPKLMIYEVNKRPSGVSNRFSGSKSGNTASLTISGLQAEDEADYYCCSYAGSSTFYVFGTGTKVTVLG

SEQ ID NO: 848 - protein, 14 aa, Homo sapiens
TGTSSDVGSYNLVS

SEQ ID NO: 849 - protein, 7 aa, Homo sapiens
EVNKRPS

SEQ ID NO: 850 - protein, 11 aa, Homo sapiens
CSYAGSSTFYV

SEQ ID NO: 851 - DNA, 381 bp, Homo sapiens
gaggtgcagctggtggagtctgggggaggcgtggtccagcctgggaggtccctgagactctcctgtgcagcctctggattcaccttcaatagctttgctatgctctgggtccgccaggctccaggcaaggggctggagtgggtggcacttttttcatatgatggaagtaataaatactacgcagactccgtgaagggccgattcaccatctccagagacaattccaagaacacgctgtatctccaaatgaacaacctgagagctgtggacacggctgtgtattactgtgcgagagcgtccccctatgacattaatggttattaccttcatcgtattgcttttgatatctggggccaggggacaatggtcaccgtctcttca

SEQ ID NO: 852 - protein, 127 aa, Homo sapiens
EVQLVESGGGVVQPGRSLRLSCAASGFTFNSFAMLWVRQAPGKGLEWVALFSYDGSNKYYADSVKGRFTISRDNSKNTLYLQMNNLRAVDTAVYYCARASPYDINGYYLHRIAFDIWGQGTMVTVSS

SEQ ID NO: 853 - protein, 5 aa, Homo sapiens
SFAML

SEQ ID NO: 854 - protein, 17 aa, Homo sapiens
LFSYDGSNKYYADSVKG

SEQ ID NO: 855 - protein, 18 aa, Homo sapiens
ASPYDINGYYLHRIAFDI

SEQ ID NO: 856 - DNA, 336 bp, Homo sapiens
cagtctgtgctgatgcagccgccctcagtgtctggggccccagggcagagggtcaccatctcctgcactgggagcagctccaacatcggggcaggttatgatgtacactggtaccagcagcttccaggaacagcccccaaactcctcatgtatggtaacagcaatcggccctcaggggtccctgaccgattctctggctccaagtctggcacctcagcctccctggccatcactgggctccaggctgaggatgaggctgattattactgccagtcctatgacagcggcctgagtggttgggtgttcggcggagggaccaagctgaccgtcctaggt

SEQ ID NO: 857 - protein, 112 aa, Homo sapiens
QSVLMQPPSVSGAPGQRVTISCTGSSSNIGAGYDVHWYQQLPGTAPKLLMYGNSNRPSGVPDRFSGSKSGTSASLAITGLQAEDEADYYCQSYDSGLSGWVFGGGTKLTVLG

SEQ ID NO: 858 - protein, 14 aa, Homo sapiens
TGSSSNIGAGYDVH

SEQ ID NO: 859 - protein, 7 aa, Homo sapiens
GNSNRPS

SEQ ID NO: 860 - protein, 11 aa, Homo sapiens
QSYDSGLSGWV

SEQ ID NO: 861 - DNA, 360 bp, Homo sapiens
gaggtgcagctggtggagtctgggggaggcgtggtccagcctgggaggtccctgagactctcctgtgcagcctctggattcaccttcagtagatacgctatgcattgggtccgccaggctccaggcaaggggctggagtgggtggcagttatatcatatgagggaagcaataaatactatgcagactccgtgaagggccgattcaccatctccagaaacaattccaacaacacactgtctctgcaaatgaacagcctgagacctgacgacacggctgtgtattactgtgtccggagtggtggccattactttgatgcttttgatctctggggccaagggacaatggtcaccgtctcttca

SEQ ID NO: 862 - protein, 120 aa, Homo sapiens
EVQLVESGGGVVQPGRSLRLSCAASGFTFSRYAMHWVRQAPGKGLEWVAVISYEGSNKYYADSVKGRFTISRNNSNNTLSLQMNSLRPDDTAVYYCVRSGGHYFDAFDLWGQGTMVTVSS

SEQ ID NO: 863 - protein, 5 aa, Homo sapiens
RYAMH

SEQ ID NO: 864 - protein, 17 aa, Homo sapiens
VISYEGSNKYYADSVKG

SEQ ID NO: 865 - protein, 11 aa, Homo sapiens
SGGHYFDAFDL

SEQ ID NO: 866 - DNA, 324 bp, Homo sapiens
gaaattgtgttgacgcagtctccaggcaccctgtctttgtctccaggggaaagagccaccctctcctgcagggccagtcagagtgttagcaggaactacgtagcctggtaccagcagaaacctggccaggctcccaggctcctcatctatggtgcatccagcagggccacaggcatcccagacaggttcagtggcagtgggtctgggacagacttcactctcaccatcagcagactggagcctgaagattttgcattgtattactgtcagcagtatggtagctcgtacacttttggccaggggaccaagctggagatcaaacga

SEQ ID NO: 867 - protein, 108 aa, Homo sapiens
EIVLTQSPGTLSLSPGERATLSCRASQSVSRNYVAWYQQKPGQAPRLLIYGASSRATGIPDRFSGSGSGTDFTLTISRLEPEDFALYYCQQYGSSYTFGQGTKLEIKR

SEQ ID NO: 868 - protein, 12 aa, Homo sapiens
RASQSVSRNYVA

SEQ ID NO: 869 - protein, 7 aa, Homo sapiens
GASSRAT

SEQ ID NO: 870 - protein, 8 aa, Homo sapiens
QQYGSSYT

SEQ ID NO: 871 - DNA, 366 bp, Homo sapiens; identical to SEQ ID NO: 441

SEQ ID NO: 872 - protein, 122 aa, Homo sapiens; identical to SEQ ID NO: 442

SEQ ID NO: 873 - protein, 5 aa, Homo sapiens
TYAMH

SEQ ID NO: 874 - protein, 17 aa, Homo sapiens
VISYDGSIKYYADSVKG

SEQ ID NO: 875 - protein, 13 aa, Homo sapiens
GGERWELFTSFDY

SEQ ID NO: 876 - DNA, 333 bp, Homo sapiens
cagtctgccctgactcagcctcgctcagtgtccgggtctcctggacagtcagtcaccatctcctgcactggaaccagcagtgatgttggtggttataactatgtctcctggtaccaacaacacccaggcaaagcccccaaactcatgatttatgatgtcagtaagcggccctcaggggtccctgatcgcttctctggctccaagtctggcaacacggcctccctgaccatctctgggctccaggctgaggatgaggctgattattactgctgctcatatgcaggcagctacactttcgtgttcggcggagggaccaagctgaccgtcctaggc

SEQ ID NO: 877 - protein, 111 aa, Homo sapiens
QSALTQPRSVSGSPGQSVTISCTGTSSDVGGYNYVSWYQQHPGKAPKLMIYDVSKRPSGVPDRFSGSKSGNTASLTISGLQAEDEADYYCCSYAGSYTFVFGGGTKLTVLG

SEQ ID NO: 878 - protein, 14 aa, Homo sapiens
TGTSSDVGGYNYVS

SEQ ID NO: 879 - protein, 7 aa, Homo sapiens
DVSKRPS

SEQ ID NO: 880 - protein, 10 aa, Homo sapiens
CSYAGSYTFV

SEQ ID NO: 881 - DNA, 372 bp, Homo sapiens
gaggtgcagctggcggagtctgggggaggcttggtcaagcctggagggtccctgagactctcctgtgcagcctctggattcaccttcagtgactactacatgagctggatccgccaggctccagggaaggggctggagtgggtttcatacattagtagtagtggtagtaccatatactacgcagactctgtgaagggccgattcaccatctccagggacaacgccaagaactcactgtatctgcaaatgaacagcctgagagccgaggacacggctgtgtattactgtgcgagagattggtcggttgtagtagtaccagctgcccctgccgtggacgtctggggccaagggaccacggtcaccgtctcctca

SEQ ID NO: 882 - protein, 124 aa, Homo sapiens
EVQLAESGGGLVKPGGSLRLSCAASGFTFSDYYMSWIRQAPGKGLEWVSYISSSGSTIYYADSVKGRFTISRDNAKNSLYLQMNSLRAEDTAVYYCARDWSVVVVPAAPAVDVWGQGTTVTVSS

SEQ ID NO: 883 - protein, 5 aa, Homo sapiens
DYYMS

SEQ ID NO: 884 - protein, 17 aa, Homo sapiens
YISSSGSTIYYADSVKG

SEQ ID NO: 885 - protein, 15 aa, Homo sapiens
DWSVVVVPAAPAVDV

SEQ ID NO: 886 - DNA, 324 bp, Homo sapiens
gacatccagatgacccagtctccatcctcactgtctgcatctgtaggagacagagtcaccatcacttgtcgggcgagtcagggcattagcaattatttagcctggtttcagcagaaaccagggaaagcccctaagtccctgatctatgctgcatccagtttgcaaagtggggtcccatcaaagttcagcggcagtggatctgggacagatttcactctcaccatcagcagcctgcagcctgaagattttgcaacttattactgccaacagtataatagttacccgctcactttcggcggagggaccaaggtggagatcaaacga

SEQ ID NO: 887 - protein, 108 aa, Homo sapiens
DIQMTQSPSSLSASVGDRVTITCRASQGISNYLAWFQQKPGKAPKSLIYAASSLQSGVPSKFSGSGSGTDFTLTISSLQPEDFATYYCQQYNSYPLTFGGGTKVEIKR

SEQ ID NO: 888 - protein, 11 aa, Homo sapiens
RASQGISNYLA

SEQ ID NO: 889 - protein, 7 aa, Homo sapiens
AASSLQS

SEQ ID NO: 890 - protein, 9 aa, Homo sapiens
QQYNSYPLT

SEQ ID NO: 891 - DNA, 378 bp, Homo sapiens
gaagtgcagctggtggagtctgggggaggcttggtcaagcctggagggtccctgagactctcctgtgcagcctctggattcaccttcagcgactattacatgatctggattcgccaggctccaggagaggggctggagtgggtttcatacattagtagtcgtagtagttacacaaactacgcagactctgtgaagggccgattcaccatctccagagacaacgccaggaactcactgtatctgcaaatgaacagcctgagagccgaggacacggctgtgtattactgtgcgagagggcaacacgatcttttgactggttattatagttgggcctactttgactactggggccagggaaccctggtcaccgtctcctca

SEQ ID NO: 892 - protein, 126 aa, Homo sapiens
EVQLVESGGGLVKPGGSLRLSCAASGFTFSDYYMIWIRQAPGEGLEWVSYISSRSSYTNYADSVKGRFTISRDNARNSLYLQMNSLRAEDTAVYYCARGQHDLLTGYYSWAYFDYWGQGTLVTVSS

SEQ ID NO: 893 - protein, 5 aa, Homo sapiens
DYYMI

SEQ ID NO: 894 - protein, 17 aa, Homo sapiens
YISSRSSYTNYADSVKG

SEQ ID NO: 895 - protein, 17 aa, Homo sapiens
GQHDLLTGYYSWAYFDY

SEQ ID NO: 896 - DNA, 333 bp, Homo sapiens
cagtctgtgctgagtcagccaccctcagcgtctgggacccccgggcagagggtcaccatctcttgttctggaagcaactccaacatcggaagtaatactgtaaactggtaccagcagctcccaggaacggcccccaaactcctcatctatagtaataatcagcggccctcaggggtccctgaccgattctctggctccaagtctggcacctcagcctccctggccatcagtgggctccagtctgaggatgaggctgattattactgtgcagcatgggatgacagcctgaatggtccggcattcggcggagggaccaagctgaccgtcctaggt

SEQ ID NO: 897 - protein, 111 aa, Homo sapiens
QSVLSQPPSASGTPGQRVTISCSGSNSNIGSNTVNWYQQLPGTAPKLLIYSNNQRPSGVPDRFSGSKSGTSASLAISGLQSEDEADYYCAAWDDSLNGPAFGGGTKLTVLG

SEQ ID NO: 898 - protein, 13 aa, Homo sapiens
SGSNSNIGSNTVN

SEQ ID NO: 899 - protein, 7 aa, Homo sapiens
SNNQRPS

SEQ ID NO: 900 - protein, 11 aa, Homo sapiens
AAWDDSLNGPA

SEQ ID NO: 901 - DNA, 384 bp, Homo sapiens
gaggtgcagctggtggagtctgggggaggcttggtaaagcctggggggtcccttagactctcctgtgcagcctctggattcactttcagtcacgcctggatgagctgggtccgccaggctccagggaaggggctggagtgggttggccgtattaaaagcaaaactgatggtgggacagcagactacgctgcacccgtgaaaggcagattcaccatctcaagagatgattcaaaaaacacgctgtatctgcaaatgaacagcctgaaaaccgaggacacagccgtgtattactgtgccaccattcggtattactatgatagtagtgcttatttgaatgatgcttttgatatctggggccaagggacaatggtcaccgtctcttca

SEQ ID NO: 902 - protein, 128 aa, Homo sapiens
EVQLVESGGGLVKPGGSLRLSCAASGFTFSHAWMSWVRQAPGKGLEWVGRIKSKTDGGTADYAAPVKGRFTISRDDSKNTLYLQMNSLKTEDTAVYYCATIRYYYDSSAYLNDAFDIWGQGTMVTVSS

SEQ ID NO: 903 - protein, 5 aa, Homo sapiens
HAWMS

SEQ ID NO: 904 - protein, 19 aa, Homo sapiens
RIKSKTDGGTADYAAPVKG

SEQ ID NO: 905 - protein, 17 aa, Homo sapiens
IRYYYDSSAYLNDAFDI

SEQ ID NO: 906 - DNA, 327 bp, Homo sapiens
tcctatgagctgacacagccaccctcggtgtcagtgtccccaggacaaacggccaggatcacctgctctggagatgcattgccaaaaaaatatgcttattggtaccagcagaagtcaggccaggcccctgtgctggtcatctatgaggacagcaaacgaccctccgggatccctgagagattctctggctccagctcagggacaatggccaccttgactatcagtggggcccaggtggaggatgaagctgactactactgttactcaacagacagcagtggtaatcatagggtattcgccggagggaccaagctgaccgtcctaggt

SEQ ID NO: 907 - protein, 109 aa, Homo sapiens
SYELTQPPSVSVSPGQTARITCSGDALPKKYAYWYQQKSGQAPVLVIYEDSKRPSGIPERFSGSSSGTMATLTISGAQVEDEADYYCYSTDSSGNHRVFAGGTKLTVLG

SEQ ID NO: 908 - protein, 11 aa, Homo sapiens
SGDALPKKYAY

SEQ ID NO: 909 - protein, 7 aa, Homo sapiens
EDSKRPS

SEQ ID NO: 910 - protein, 11 aa, Homo sapiens
YSTDSSGNHRV

SEQ ID NO: 911 - DNA, 372 bp, Homo sapiens
gaggtgcagctggtggagtctgggggaggcttggtacagccagggcggtccctgagactctcctgtacatcctctggattcacctttggtgattttgctatgagttggttccgccaggcgccagggagggggctggagtgggtaggtttaattggaggcagacttaaccctgggacaaaagaatacgccgcgtctgtgaaaggcagattcaccatctcaagagatgattccaaaagcatcgtctatctgcaaatgaacagcctgaaaaccgacgacacagccatgtattattgtagtagagattcatatggtagttttcccgttgatgcttttgatgtctggggccgagggacaatggtcaccgtctcttca

SEQ ID NO: 912 - protein, 124 aa, Homo sapiens
EVQLVESGGGLVQPGRSLRLSCTSSGFTFGDFAMSWFRQAPGRGLEWVGLIGGRLNPGTKEYAASVKGRFTISRDDSKSIVYLQMNSLKTDDTAMYYCSRDSYGSFPVDAFDVWGRGTMVTVSS

SEQ ID NO: 913 - protein, 5 aa, Homo sapiens
DFAMS

SEQ ID NO: 914 - protein, 19 aa, Homo sapiens
LIGGRLNPGTKEYAASVKG

SEQ ID NO: 915 - protein, 13 aa, Homo sapiens
DSYGSFPVDAFDV

SEQ ID NO: 916 - DNA, 339 bp, Homo sapiens
gatgttctgctgacccagactccactctctctgtccgtcacccctggacagccggcctccatctcctgcaggtctagtcagagcctcgtacatactgatggaaagacctacttctattggttcgtgcagaagccaggccagtctccacagctcctgatctatgaagactccacccgcttttctggagtgccggataggttcagtggcagcgggtcagagacagatttcacactgaaaatcagccgggtggagtctgaggatgttgggatttattactgcatgcatactataaactttcctcgaacgttcggccaagggaccaaggtggaaatccaacga

SEQ ID NO: 917 - protein, 113 aa, Homo sapiens
DVLLTQTPLSLSVTPGQPASISCRSSQSLVHTDGKTYFYWFVQKPGQSPQLLIYEDSTRFSGVPDRFSGSGSETDFTLKISRVESEDVGIYYCMHTINFPRTFGQGTKVEIQR

SEQ ID NO: 918 - protein, 16 aa, Homo sapiens
RSSQSLVHTDGKTYFY

SEQ ID NO: 919 - protein, 7 aa, Homo sapiens
EDSTRFS

SEQ ID NO: 920 - protein, 9 aa, Homo sapiens
MHTINFPRT

SEQ ID NO: 921 - DNA, 384 bp, Homo sapiens
gaggtgcagctggtggagtctgggggaggcctggtcaagcctggggggtccctgagactctcctgtgcagcctctggattcaccttcgggagctataccatgaactgggtccgccaggctccagggaagggactggagtgggtctcatccattgatactactagtagttccatatactacgcagactcactgaagggccgattcgccatctccagagacagcgccaagaactcactgtatctgcaaatgaatcgcctgagagccgaggacacggctgtgtattactgtgcgagagggaatgggcattcctatgatagtagtggttatcactacgggatgtactttgactactggggccagggaaccctggtcaccgtctcctca

SEQ ID NO: 922 - protein, 128 aa, Homo sapiens
EVQLVESGGGLVKPGGSLRLSCAASGFTFGSYTMNWVRQAPGKGLEWVSSIDTTSSSIYYADSLKGRFAISRDSAKNSLYLQMNRLRAEDTAVYYCARGNGHSYDSSGYHYGMYFDYWGQGTLVTVSS

SEQ ID NO: 923 - protein, 5 aa, Homo sapiens
SYTMN

SEQ ID NO: 924 - protein, 17 aa, Homo sapiens
SIDTTSSSIYYADSLKG

SEQ ID NO: 925 - protein, 19 aa, Homo sapiens
GNGHSYDSSGYHYGMYFDY

SEQ ID NO: 926 - DNA, 324 bp, Homo sapiens
gacatccagatgacccagtctccttccaccctgtctgcatctgtaggagacagagtcaccatcacttgccgggccagtcagagtattagtaggtggttggcctggtatcagcaaaaaccagggaaagcccctaaactcctgatctatgaggtgtctagtttagaaaatggggtcccatcaaggttcagcggcagtcgatctgggacagaattcactctcaccatcagcagcctgcagcctgatgattttgcaatatattactgccaacagtataatacttattctcggacgttcggccaagggaccaaggtggaaatcaaacga

SEQ ID NO: 927 - protein, 108 aa, Homo sapiens
DIQMTQSPSTLSASVGDRVTITCRASQSISRWLAWYQQKPGKAPKLLIYEVSSLENGVPSRFSGSRSGTEFTLTISSLQPDDFAIYYCQQYNTYSRTFGQGTKVEIKR

SEQ ID NO: 928 - protein, 11 aa, Homo sapiens
RASQSISRWLA

SEQ ID NO: 929 - protein, 7 aa, Homo sapiens
EVSSLEN

SEQ ID NO: 930 - protein, 9 aa, Homo sapiens
QQYNTYSRT

SEQ ID NO: 931 - DNA, 351 bp, Homo sapiens
caggtgcagctgcaggagtcgggcccaggactggtgaagccttcggagaccctgtccctcacctgcgctgtctctggttactccatcagcagtggttactactggggctggatccggcagcccccagggaaggggctggagtggattgggagtatctatcatagtgggagcacctactacaacccgtccctcaagagtcgagtcaccatatcagtagacacgtccaagaaccagttctccctgaagctgagctctgtgaccgccgcagacacggccgtgtattactgtgcgagagccttgtatgatgcttttgatatctggggccaagggacaatggtcaccgtctcctca

SEQ ID NO: 932 - protein, 117 aa, Homo sapiens
QVQLQESGPGLVKPSETLSLTCAVSGYSISSGYYWGWIRQPPGKGLEWIGSIYHSGSTYYNPSLKSRVTISVDTSKNQFSLKLSSVTAADTAVYYCARALYDAFDIWGQGTMVTVSS

SEQ ID NO: 933 - protein, 6 aa, Homo sapiens
SGYYWG

SEQ ID NO: 934 - protein, 16 aa, Homo sapiens
SIYHSGSTYYNPSLKS

SEQ ID NO: 935 - protein, 8 aa, Homo sapiens
ALYDAFDI

SEQ ID NO: 936 - DNA, 324 bp, Homo sapiens
gacatccagatgacccagtctccttccaccctgtctgcatctgtaggagacagagtcaccatcacttgccgggccagtcagagtattagtagctggttggcctggtatcagcagaaaccagggaaagcccctaagctcctgatctataaggcgtctagtttagaaagtggggtcccatcaaggttcagcggcagtggatctgggacagaattcactctcaccatcagcagcctgcagcctgatgattttgcaacttattactgccaacagtataatagttatgctctcactttcggcggagggaccaaggtggagatcaaacga

SEQ ID NO: 937 - protein, 108 aa, Homo sapiens
DIQMTQSPSTLSASVGDRVTITCRASQSISSWLAWYQQKPGKAPKLLIYKASSLESGVPSRFSGSGSGTEFTLTISSLQPDDFATYYCQQYNSYALTFGGGTKVEIKR

SEQ ID NO: 938 - protein, 11 aa, Homo sapiens
RASQSISSWLA

SEQ ID NO: 939 - protein, 7 aa, Homo sapiens
KASSLES

SEQ ID NO: 940 - protein, 9 aa, Homo sapiens
QQYNSYALT

SEQ ID NO: 941 - DNA, 363 bp, Homo sapiens
gaggtgcagctggtggagtctgggggaggcgtggtccagcctgggaggtccctgagactctcctgtgcagcctctggattcaccttcagtagctatgctatgcactgggtccgccaggctccaggcaaggggctggagtgggtggcagttatatcatatgatggaagcaataaatactacgcagactccgtgaagggccgattcaccatctccagagacaattccaagaacacgctgtatctgcaaatgaacagcctgagagctgaggacacggctgtgtattactgtgcgagagcacgcggtgggagctactactacggtatggacgtctggggccaagggaccacggtcaccgtctcctca

SEQ ID NO: 942 - protein, 121 aa, Homo sapiens
EVQLVESGGGVVQPGRSLRLSCAASGFTFSSYAMHWVRQAPGKGLEWVAVISYDGSNKYYADSVKGRFTISRDNSKNTLYLQMNSLRAEDTAVYYCARARGGSYYYGMDVWGQGTTVTVSS

SEQ ID NO: 943 - protein, 5 aa, Homo sapiens
SYAMH

SEQ ID NO: 944 - protein, 17 aa, Homo sapiens
VISYDGSNKYYADSVKG

SEQ ID NO: 945 - protein, 12 aa, Homo sapiens
ARGGSYYYGMDV

SEQ ID NO: 946 - DNA, 324 bp, Homo sapiens
gacatccagatgacccagtctccatcctccctgtctgcatctgtaggagacagagtcaccatcacttgccgggcaagtcagagcattagcagctatttaaattggtatcagcagaaaccagggaaagcccctaagctcctgatctatgctgcatccagtttgcaaagtggggtcccatcaaggttcagtggcagtggatctgggacagatttcactctcaccatcagcagtctgcaacctgaagattttgcaacttactactgtcaacagagttacagtaccccgctcactttcggcggagggaccaaggtggagatcaaacga

SEQ ID NO: 947 - protein, 108 aa, Homo sapiens; identical to SEQ ID NO: 467

SEQ ID NO: 948 - protein, 11 aa, Homo sapiens
RASQSISSYLN

SEQ ID NO: 949 - protein, 7 aa, Homo sapiens
AASSLQS

SEQ ID NO: 950 - protein, 9 aa, Homo sapiens
QQSYSTPLT

SEQ ID NO: 951 - DNA, 372 bp, Homo sapiens
gaggtgcagctggtggagtcggggggaggcttggtccagccggggcggagtctgagactctcctgtacagcttctggattcatttttggcgattctagtatgagctgggtccgccaggctccagggaaggggctggagtgggtgggcttcattgcaagcaaaatttatggcgcgacaatagaatacgccgcgtctgtcaaaggcagattcatcatctcaagagatgattccaaaagtatcgcctatttgcaaatgaacagcctgaaaaccgaggacacagccatgtattactgtactagagattcatatggacatttccccgctgatgcttttgatatctggggccaagggacaatggtcaccgtctcttca

SEQ ID NO: 952 - protein, 124 aa, Homo sapiens
EVQLVESGGGLVQPGRSLRLSCTASGFIFGDSSMSWVRQAPGKGLEWVGFIASKIYGATIEYAASVKGRFIISRDDSKSIAYLQMNSLKTEDTAMYYCTRDSYGHFPADAFDIWGQGTMVTVSS

SEQ ID NO: 953 - protein, 5 aa, Homo sapiens
DSSMS

SEQ ID NO: 954 - protein, 19 aa, Homo sapiens
FIASKIYGATIEYAASVKG

SEQ ID NO: 955 - protein, 13 aa, Homo sapiens
DSYGHFPADAFDI

SEQ ID NO: 956 - DNA, 339 bp, Homo sapiens
gatgttgtgatgacacagactcccctctctctgtccgtcacccctggacagtcggcctccatctcctgcaggtctagtcagagtctcatacacactgatcagaagacctatttgtattggtacctgcagaaaccaggccagcctccacaactcctgatatatgatgttttcaaccggttctctggagtgccagataggttcagtggcagcgggtcagggacagatttcacactgaaaatcagccgggtggagcctgaggatgttggaatttattactgcatgcacgctatacagcttcctcggacgttcggccaagggaccaaggtggaaatcaaacga

SEQ ID NO: 957 - protein, 113 aa, Homo sapiens
DVVMTQTPLSLSVTPGQSASISCRSSQSLIHTDQKTYLYWYLQKPGQPPQLLIYDVFNRFSGVPDRFSGSGSGTDFTLKISRVEPEDVGIYYCMHAIQLPRTFGQGTKVEIKR

SEQ ID NO: 958 - protein, 16 aa, Homo sapiens
RSSQSLIHTDQKTYLY

SEQ ID NO: 959 - protein, 7 aa, Homo sapiens
DVFNRFS

SEQ ID NO: 960 - protein, 9 aa, Homo sapiens
MHAIQLPRT

SEQ ID NO: 961 - DNA, 363 bp, Homo sapiens
gaagtgcagctagtggagtctgggggaggcttggttcagcctggcaggtccctgagactctcctgtgtagcctctggattcatcgtcgaaaattttgccatgcattgggtccgacaggctccgggaaagggcctggaatgggtctcaggcatcacttggaatagtgctagtacaggctatgtggagtctgtgaagggccgattctccatctccagagacaacggcgagaattccatgttcttggaaatgaatagtctgagacctgacgacacggccctgtattattgtgtcaaagccactgggagttattggggcttccctatggacgtctggggccaagggacaacggtcaccgtctcctca

SEQ ID NO: 962 - protein, 121 aa, Homo sapiens
EVQLVESGGGLVQPGRSLRLSCVASGFIVENFAMHWVRQAPGKGLEWVSGITWNSASTGYVESVKGRFSISRDNGENSMFLEMNSLRPDDTALYYCVKATGSYWGFPMDVWGQGTTVTVSS

SEQ ID NO: 963 - protein, 5 aa, Homo sapiens
NFAMH

SEQ ID NO: 964 - protein, 17 aa, Homo sapiens
GITWNSASTGYVESVKG

SEQ ID NO: 965 - protein, 12 aa, Homo sapiens
ATGSYWGFPMDV

SEQ ID NO: 966 - DNA, 327 bp, Homo sapiens
gaaattgtgttgacgcagtctccagggaccctgtctttgtctccaggggaaggaggcaccctctcctgcagggccagtcagagtgttcgcagcaactacttagcctggtaccagcgtaaacctggccaggctcccaggctcctcatctatgctacatccaatagggccactggcattccagacaggttcagtggcagtgggtctgggacagacttcactctcaccatcagcagactggagcctgaagattttgcagtgtatttctgtcaacactatggtgactcaccctacacttttggccaggggaccaagctggagatcaaacga

SEQ ID NO: 967 - protein, 109 aa, Homo sapiens
EIVLTQSPGTLSLSPGEGGTLSCRASQSVRSNYLAWYQRKPGQAPRLLIYATSNRATGIPDRFSGSGSGTDFTLTISRLEPEDFAVYFCQHYGDSPYTFGQGTKLEIKR

SEQ ID NO: 968 - protein, 12 aa, Homo sapiens
RASQSVRSNYLA

SEQ ID NO: 969 - protein, 7 aa, Homo sapiens
ATSNRAT

SEQ ID NO: 970 - protein, 9 aa, Homo sapiens
QHYGDSPYT

SEQ ID NO: 971 - DNA, 369 bp, Homo sapiens
caggtgcagcttcagcagtggggcgcaggactgttgaagccttcggacaccctgtccctcacctgcgctgccaatggtggtgggtccttcagtggttactacttgggctacattcgccagtccccaggcaaggggctggagtggattggggaaatcaatcataatggaggcaccaattacaacccgtccctcaagagtcgagtcaccatatcaggagacacgtccaagaaccagttctccctgaagctgagttctgtgaccgccgcggacacggctatatattattgtgcgagaagcagagattcgtcgctgggggatgctgtatggtacgagtattggggccagggaaccctaatcaccgtctcctca

SEQ ID NO: 972 - protein, 123 aa, Homo sapiens
QVQLQQWGAGLLKPSDTLSLTCAANGGGSFSGYYLGYIRQSPGKGLEWIGEINHNGGTNYNPSLKSRVTISGDTSKNQFSLKLSSVTAADTAIYYCARSRDSSLGDAVWYEYWGQGTLITVSS

SEQ ID NO: 973 - protein, 6 aa, Homo sapiens
SGYYLG

SEQ ID NO: 974 - protein, 16 aa, Homo sapiens
EINHNGGTNYNPSLKS

SEQ ID NO: 975 - protein, 14 aa, Homo sapiens
SRDSSLGDAVWYEY

SEQ ID NO: 976 - DNA, 324 bp, Homo sapiens
gaaattgtgttgacacagtctccagccaccctgtctttgtctccaggggagagagccaccctctcctgcagggccagtcagagtgttgacatctacttagcctggtaccaacagagacctggccaggctcccaggctcctcatctctgatgcatccaagagggccacaggcgtcccagccaggttcagtggcagtgggtctgggacagacttcactctcaccatcaacagcctagaacctgaagatttcgctatttattactgtcagcagcgacgcgactggccgatcaacttcggccaagggacacggctggagattaaacga

SEQ ID NO: 977 - protein, 108 aa, Homo sapiens
EIVLTQSPATLSLSPGERATLSCRASQSVDIYLAWYQQRPGQAPRLLISDASKRATGVPARFSGSGSGTDFTLTINSLEPEDFAIYYCQQRRDWPINFGQGTRLEIKR

SEQ ID NO: 978 - protein, 11 aa, Homo sapiens
RASQSVDIYLA

SEQ ID NO: 979 - protein, 7 aa, Homo sapiens
DASKRAT

SEQ ID NO: 980 - protein, 9 aa, Homo sapiens
QQRRDWPIN

SEQ ID NO: 981 - DNA, 363 bp, Homo sapiens
gaggtgcagctggtggagtctgggggaggcgtggtccagcctgggacgtccctgagactcacctgtgcagcgtctggattccctttcaataattatggcttccactgggtccgcctggctccaggcaagggcctggagtgggtggcttataaatggtctgatggcactttcggaaagcatgactcctatgcggacttcgcgaagggccgattcaccgtctccagagacaacagcaagaatatgttatatctggaaatcaacagcctgagacccgaggacacggctatctattattgtgcgcgagacggggcccactgggaagtcgacaactggggccgcggaaccctggtcaccgtctcctca

SEQ ID NO: 982 - protein, 121 aa, Homo sapiens
EVQLVESGGGVVQPGTSLRLTCAASGFPFNNYGFHWVRLAPGKGLEWVAYKWSDGTFGKHDSYADFAKGRFTVSRDNSKNMLYLEINSLRPEDTAIYYCARDGAHWEVDNWGRGTLVTVSS

SEQ ID NO: 983 - protein, 5 aa, Homo sapiens
NYGFH

SEQ ID NO: 984 - protein, 20 aa, Homo sapiens
YKWSDGTFGKHDSYADFAKG

SEQ ID NO: 985 - protein, 9 aa, Homo sapiens
DGAHWEVDN

SEQ ID NO: 986 - DNA, 333 bp, Homo sapiens
cagtctgccctgactcagcctccctccgcgtccgggtctcctggacaatcagtcaccatctcctgcactggaaccaccacttatgttggggattatgactatgtctcctggtatcaggtacacccagacacagccccccgactcatcatttatgaggtcaataagcggccctcaggggtccctgatcgcttctctggctccaagtctggcaacacggcctccctgaccgtctctgggctccaggctgaggatgaggctgattattactgcagctcaaaaccacccaacgacaacagggtgttcggcggagggaccaggctgacggtcttaggt

SEQ ID NO: 987 - protein, 111 aa, Homo sapiens
QSALTQPPSASGSPGQSVTISCTGTTTYVGDYDYVSWYQVHPDTAPRLIIYEVNKRPSGVPDRFSGSKSGNTASLTVSGLQAEDEADYYCSSKPPNDNRVFGGGTRLTVLG

SEQ ID NO: 988 - protein, 14 aa, Homo sapiens
TGTTTYVGDYDYVS

SEQ ID NO: 989 - protein, 7 aa, Homo sapiens
EVNKRPS

SEQ ID NO: 990 - protein, 10 aa, Homo sapiens
SSKPPNDNRV

SEQ ID NO: 991 - protein, 8 aa, Homo sapiens
GYTFTGYY

SEQ ID NO: 992 - protein, 8 aa, Homo sapiens
GYTLTELS

SEQ ID NO: 993 - protein, 8 aa, Homo sapiens
GYTLVELS

SEQ ID NO: 994 - protein, 8 aa, Homo sapiens
GYTLPELS

SEQ ID NO: 995 - protein, 8 aa, Homo sapiens
GYMLIELS

SEQ ID NO: 996 - protein, 8 aa, Homo sapiens
GYTLIELS

SEQ ID NO: 997 - protein, 9 aa, Homo sapiens
GGSISSSNW

SEQ ID NO: 998 - protein, 8 aa, Homo sapiens
GFTFSSYT

SEQ ID NO: 999 - protein, 8 aa, Homo sapiens
GFTFSTYA

SEQ ID NO: 1000 - protein, 8 aa, Homo sapiens
GFTFNNYA

SEQ ID NO: 1001 - protein, 8 aa, Homo sapiens
GFTFSSYG

SEQ ID NO: 1002 - protein, 8 aa, Homo sapiens
GYTLTDLS

SEQ ID NO: 1003 - protein, 8 aa, Homo sapiens
GFSVSTNY

SEQ ID NO: 1004 - protein, 8 aa, Homo sapiens
GFTFSSYA

SEQ ID NO: 1005 - protein, 8 aa, Homo sapiens
GFTFSSYS

SEQ ID NO: 1006 - protein, 10 aa, Homo sapiens
GDSISSSDYS

SEQ ID NO: 1007 - protein, 8 aa, Homo sapiens
GFTFSDYY

SEQ ID NO: 1008 - protein, 8 aa, Homo sapiens
GGTSSSYA

SEQ ID NO: 1009 - protein, 8 aa, Homo sapiens
GFTFSIYG

SEQ ID NO: 1010 - protein, 8 aa, Homo sapiens
GYSFISYW

SEQ ID NO: 1011 - protein, 8 aa, Homo sapiens
GFTFSNAW

SEQ ID NO: 1012 - protein, 8 aa, Homo sapiens
GFIFSSYG

SEQ ID NO: 1013 - protein, 8 aa, Homo sapiens
GFTFSNYA

SEQ ID NO: 1014 - protein, 10 aa, Homo sapiens
GGSISGSNYF

SEQ ID NO: 1015 - protein, 8 aa, Homo sapiens
INPSSGGT

SEQ ID NO: 1016 - protein, 8 aa, Homo sapiens
FDPEDGET

SEQ ID NO: 1017 - protein, 8 aa, Homo sapiens
FDPEDGKI

SEQ ID NO: 1018 - protein, 8 aa, Homo sapiens
FDPEDAET

SEQ ID NO: 1019 - protein, 8 aa, Homo sapiens
FDPEDAKT

SEQ ID NO: 1020 - protein, 7 aa, Homo sapiens
IYHSGST

SEQ ID NO: 1021 - protein, 8 aa, Homo sapiens
ISSGSSFI

SEQ ID NO: 1022 - protein, 8 aa, Homo sapiens
ISYDGRNK

SEQ ID NO: 1023 - protein, 8 aa, Homo sapiens
ISYDGSSK

SEQ ID NO: 1024 - protein, 8 aa, Homo sapiens
IWHDGSQK

SEQ ID NO: 1025 - protein, 8 aa, Homo sapiens
FDAEDGET

SEQ ID NO: 1026 - protein, 7 aa, Homo sapiens
IYSGGGT

SEQ ID NO: 1027 - protein, 8 aa, Homo sapiens
LSYDGSNK

SEQ ID NO: 1028 - protein, 8 aa, Homo sapiens
ISYDGSNK

SEQ ID NO: 1029 - protein, 8 aa, Homo sapiens
ISSSSSTI

SEQ ID NO: 1030 - protein, 8 aa, Homo sapiens
ISYDGSIK

SEQ ID NO: 1031 - protein, 7 aa, Homo sapiens
IYYIKNT

SEQ ID NO: 1032 - protein, 8 aa, Homo sapiens
ISSSGSTI

SEQ ID NO: 1033 - protein, 8 aa, Homo sapiens
IIPIFDTT

SEQ ID NO: 1034 - protein, 8 aa, Homo sapiens
ISYDGTNK

SEQ ID NO: 1035 - protein, 8 aa, Homo sapiens
IYPGDSDT

SEQ ID NO: 1036 - protein, 8 aa, Homo sapiens
IWYDGSNK

SEQ ID NO: 1037 - protein, 10 aa, Homo sapiens
IKSKTDGGTT

SEQ ID NO: 1038 - protein, 7 aa, Homo sapiens
IYYGGST

SEQ ID NO: 1039 - protein, 15 aa, Homo sapiens
CATDGDDGENWFDPW

SEQ ID NO: 1040 - protein, 23 aa, Homo sapiens
CATAGAITGTPRNFYYYYGMDVW

SEQ ID NO: 1041 - protein, 16 aa, Homo sapiens
CVTSQPFVSPNWFDPW

SEQ ID NO: 1042 - protein, 16 aa, Homo sapiens
CATSPAVVERGWFDPW

SEQ ID NO: 1043 - protein, 23 aa, Homo sapiens
CATAGAITGTPTNYSYYYGMDFW

SEQ ID NO: 1044 - protein, 15 aa, Homo sapiens
CTTGPAVTNRPADYW

SEQ ID NO: 1045 - protein, 17 aa, Homo sapiens
CATTPAFMAAAGDFDYW

SEQ ID NO: 1046 - protein, 10 aa, Homo sapiens
CARGWNYDYW

SEQ ID NO: 1047 - protein, 20 aa, Homo sapiens
CARAPEPQSVIYAYWYFDLW

SEQ ID NO: 1048 - protein, 21 aa, Homo sapiens
CATGKINYYDSSGYYGTFDYW

SEQ ID NO: 1049 - protein, 12 aa, Homo sapiens
CARDTGGIIDYW

SEQ ID NO: 1050 - protein, 19 aa, Homo sapiens
CARDGDGLWLGESFYFDDW

SEQ ID NO: 1051 - protein, 23 aa, Homo sapiens
CARDSGDDYDSSGYPIGNAFDLW

SEQ ID NO: 1052 - protein, 11 aa, Homo sapiens
CATGSVGPDYW

SEQ ID NO: 1053 - protein, 15 aa, Homo sapiens
CASFLVGATGQPWYW

SEQ ID NO: 1054 - protein, 22 aa, Homo sapiens
CARDGVSVTMVRGVIGPLCDYW

SEQ ID NO: 1055 - protein, 22 aa, Homo sapiens
CAKDSPYYYDSSGYYPGYFQDW

SEQ ID NO: 1056 - protein, 22 aa, Homo sapiens
CARVARRDVAPATIAAYFLDYW

SEQ ID NO: 1057 - protein, 17 aa, Homo sapiens
CAKGGERWELFTSFDYW

SEQ ID NO: 1058 - protein, 25 aa, Homo sapiens
CARERPPFDVVVVPAARPYNWFDPW

SEQ ID NO: 1059 - protein, 19 aa, Homo sapiens
CARDWSVVVVPAAPAVDVW

SEQ ID NO: 1060 - protein, 18 aa, Homo sapiens
CAKVADRVGASTGELDYW

SEQ ID NO: 1061 - protein, 22 aa, Homo sapiens
CAKVLMMGDSSGFSLGDAFDIW

SEQ ID NO: 1062 - protein, 16 aa, Homo sapiens
CARLLYYSDSSPLDSW

SEQ ID NO: 1063 - protein, 19 aa, Homo sapiens
CARGPLGSNYFNYDAFDIW

SEQ ID NO: 1064 - protein, 18 aa, Homo sapiens
CTTEYSSIAARIDAFDIW

SEQ ID NO: 1065 - protein, 23 aa, Homo sapiens
CARDLSSSSGWDDYYYYYGMDVW

SEQ ID NO: 1066 - protein, 21 aa, Homo sapiens
CARAPEGITIFGVVTISPFDY

SEQ ID NO: 1067 - protein, 15 aa, Homo sapiens
CARDSGDYVDYFDYW

SEQ ID NO: 1068 - protein, 14 aa, Homo sapiens
CANLAWLRGYFDYW

SEQ ID NO: 1069 - protein, 11 aa, Homo sapiens [sequence omitted]

SEQ ID NO: 1070 - protein, 11 aa, Homo sapiens [sequence omitted]

SEQ ID NO: 1071 - protein, 12 aa, Homo sapiens
CSSYTGSRTLVF

SEQ ID NO: 1072 - protein, 11 aa, Homo sapiens [sequence omitted]

SEQ ID NO: 1073 - protein, 11 aa, Homo sapiens [sequence omitted]

SEQ ID NO: 1074 - protein, 14 aa, Homo sapiens
CQSYDSSLSYSVVF

SEQ ID NO: 1075 - protein, 9 aa, Homo sapiens
CYSAAAWVF

SEQ ID NO: 1076 - protein, 12 aa, Homo sapiens [sequence omitted]

SEQ ID NO: 1077 - protein, 13 aa, Homo sapiens [sequence omitted]

SEQ ID NO: 1078 - protein, 11 aa, Homo sapiens [sequence omitted]

SEQ ID NO: 1079 - protein, 11 aa, Homo sapiens [sequence omitted]

SEQ ID NO: 1080 - protein, 11 aa, Homo sapiens [sequence omitted]

SEQ ID NO: 1081 - protein, 11 aa, Homo sapiens [sequence omitted]

SEQ ID NO: 1082 - protein, 13 aa, Homo sapiens [sequence omitted]

SEQ ID NO: 1083 - protein, 11 aa, Homo sapiens [sequence omitted]

SEQ ID NO: 1084 - protein, 11 aa, Homo sapiens [sequence omitted]

SEQ ID NO: 1085 - protein, 11 aa, Homo sapiens [sequence omitted]

SEQ ID NO: 1086 - protein, 13 aa, Homo sapiens
CQQRSTWPRGFTF

SEQ ID NO: 1087 - protein, 12 aa, Homo sapiens [sequence omitted]

SEQ ID NO: 1088 - protein, 14 aa, Homo sapiens [sequence omitted]

SEQ ID NO: 1089 - protein, 11 aa, Homo sapiens [sequence omitted]

SEQ ID NO: 1090 - protein, 12 aa, Homo sapiens [sequence omitted]

SEQ ID NO: 1091 - protein, 11 aa, Homo sapiens [sequence omitted]

SEQ ID NO: 1092 - protein, 11 aa, Homo sapiens [sequence omitted]

SEQ ID NO: 1093 - protein, 11 aa, Homo sapiens [sequence omitted]

SEQ ID NO: 1094 - protein, 12 aa, Homo sapiens [sequence omitted]

SEQ ID NO: 1095 - protein, 13 aa, Homo sapiens
CQAWDSSTSYVVF

SEQ ID NO: 1096 - protein, 11 aa, Homo sapiens [sequence omitted]

SEQ ID NO: 1097 - protein, 12 aa, Homo sapiens [sequence omitted]

SEQ ID NO: 1098 - protein, 11 aa, Homo sapiens [sequence omitted]

SEQ ID NO: 1099 - protein, 98 aa, Homo sapiens
QVQLVESGGGVVQPGRSLRLSCAASGFTFSSYGMHWVRQAPGKGLEWVAVISYDGSNKYYADSVKGRFTISRDNSKNTLYLQMNSLRAEDTAVYYCAK

SEQ ID NO: 1100 - protein, 117 aa, Homo sapiens
EVQLVESGGGVVQPGRSLRLSCAASGFTFSSYGMHWVRQAPGKGLEWVAVISYDGSNKYYADSVKGRFTISRDNSKNTLSLQMNSLRPEDTAVYYCAKDSPYYYDSSGYYPGYFQDW

SEQ ID NO: 1101 - protein, 114 aa, Homo sapiens
EVQLVESGGGVVQPGRSLRLSCAASGFTFSIYGMHWVRQAPGKGLEWVAVISYDGSNKYYADSVKGRFTISRDNSKNTLYLQMNSLRAEDTAVYYCAKEGRPSDIVVVVAFDYW

SEQ ID NO: 1102 - protein, 98 aa, Homo sapiens
DIQMTQSPSSLSASVGDRVTITCRASQSISSYLNWYQQKPGKAPKLLIYAASSLQSGVPSRFSGSGSGTDFTLTISSLQPEDFATYYCQQSYSTPRTF

SEQ ID NO: 1103 - protein, 98 aa, Homo sapiens
DIQMTQSPSSLSASIGDRVTITCRASQTISDYLNWYQQKPGKAPNLLIYAASTLQSGVPSRFSGSGSGTDFTLTISSLQPEDFATYYCQQSYITPRTF

SEQ ID NO: 1104 - protein, 98 aa, Homo sapiens
DIQLTQSPSSLSASVGDRVTITCRASQSISSYLNWYQQKPGKAPKLLIYAASSLQSGVPSRFSGSGSGTDFTLTISSLQPEDFATYYCQQSYSTPRTF

SEQ ID NO: 1105 - protein, 105 aa, Homo sapiens
QLQLQESGPGLVKPSETLSLTCTVSGGSISSSSYYWGWIRQPPGKGLEWIGSIYYSGSTYYNPSLKSRVTISVDTSKNQFSLKLSSVTAADTAVYYCARNWFDPW

SEQ ID NO: 1106 - protein, 121 aa, Homo sapiens
QVQLQESGPGLVKPSETLSLTCSVSGDSISSSDYSWGWIRQPPGKGLEWIGTIYYIKNTYYNPSLRSRVTLSVDTSKNLFSLKLSSVTAADTAVYYCARERPPFDVVVVPAARPYNWFDPW

SEQ ID NO: 1107 - protein, 102 aa, Homo sapiens
QSVLTQPPSVSGAPGQRVTISCTGSSSNIGAGYDVHWYQQLPGTAPKLLIYGNSNRPSGVPDRFSGSKSGTSASLAITGLQAEDEADYYCQSYDSSLSGVVF

SEQ ID NO: 1108 - protein, 103 aa, Homo sapiens
QSVLMQPPSVSGAPGQRVTISCTGSSSNIGAGYDVHWYQQLPGTAPKLLIYGNNNRPSGVPDRFSGSKSGTSASLAITGLQADDEADYYCQSYDSSLSGSKVF

SEQ ID NO: 1109 - protein, 8 aa, Homo sapiens
GYTFTGYY

SEQ ID NO: 1110 - protein, 8 aa, Homo sapiens
GYTLTELS

SEQ ID NO: 1111 - protein, 8 aa, Homo sapiens
GYTLVELS

SEQ ID NO: 1112 - protein, 8 aa, Homo sapiens
GYTLPELS

SEQ ID NO: 1113 - protein, 8 aa, Homo sapiens
GYTLTELS

SEQ ID NO: 1114 - protein, 8 aa, Homo sapiens
GYMLIELS

SEQ ID NO: 1115 - protein, 8 aa, Homo sapiens
GYTLIELS

SEQ ID NO: 1116 - protein, 9 aa, Homo sapiens
GGSISSSNW

SEQ ID NO: 1117 - protein, 8 aa, Homo sapiens
GFTFSSYT

SEQ ID NO: 1118 - protein, 8 aa, Homo sapiens
GYTLTELS

SEQ ID NO: 1119 - protein, 8 aa, Homo sapiens
GFTFSTYA

SEQ ID NO: 1120 - protein, 8 aa, Homo sapiens
GFTFNNYA

SEQ ID NO: 1121 - protein, 8 aa, Homo sapiens
GFTFSSYG

SEQ ID NO: 1122 - protein, 8 aa, Homo sapiens
GYTLTDLS

SEQ ID NO: 1123 - protein, 8 aa, Homo sapiens
GFSVSTNY

SEQ ID NO: 1124 - protein, 8 aa, Homo sapiens
GFTFSSYA

SEQ ID NO: 1125 - protein, 8 aa, Homo sapiens
GFTFSSYG

SEQ ID NO: 1126 - protein, 8 aa, Homo sapiens
GFTFSSYS

SEQ ID NO: 1127 - protein, 8 aa, Homo sapiens
GFTFSTYA

SEQ ID NO: 1128 - protein, 10 aa, Homo sapiens
GDSISSSDYS

SEQ ID NO: 1129 - protein, 8 aa, Homo sapiens
GFTFSDYY

SEQ ID NO: 1130 - protein, 8 aa, Homo sapiens
GGTSSSYA

SEQ ID NO: 1131 - protein, 8 aa, Homo sapiens
GFTFSIYG

SEQ ID NO: 1132 - protein, 8 aa, Homo sapiens
GYSFISYW

SEQ ID NO: 1133 - protein, 8 aa, Homo sapiens
GFTFSSYG

SEQ ID NO: 1134 - protein, 8 aa, Homo sapiens
GFTFSNAW

SEQ ID NO: 1135 - protein, 8 aa, Homo sapiens
GFIFSSYG

SEQ ID NO: 1136 - protein, 8 aa, Homo sapiens
GFTFSSYD

SEQ ID NO: 1137 - protein, 8 aa, Homo sapiens
GFTFSNYA

SEQ ID NO: 1138 - protein, 10 aa, Homo sapiens
GGSISGSNYF

SEQ ID NO: 1139 - protein, 8 aa, Homo sapiens
INPSSGGT

SEQ ID NO: 1140 - protein, 8 aa, Homo sapiens
FDPEDGET

SEQ ID NO: 1141 - protein, 8 aa, Homo sapiens
FDPEDGET

SEQ ID NO: 1142 - protein, 8 aa, Homo sapiens
FDPEDGKI

SEQ ID NO: 1143 - protein, 8 aa, Homo sapiens
FDPEDAET

SEQ ID NO: 1144 - protein, 8 aa, Homo sapiens
FDPEDAET

SEQ ID NO: 1145 - protein, 8 aa, Homo sapiens
FDPEDAKT

SEQ ID NO: 1146 - protein, 7 aa, Homo sapiens
IYHSGST

SEQ ID NO: 1147 - protein, 8 aa, Homo sapiens
ISSGSSFI

SEQ ID NO: 1148 - protein, 8 aa, Homo sapiens
FDPEDGET

SEQ ID NO: 1149 - protein, 8 aa, Homo sapiens
ISYDGRNK

SEQ ID NO: 1150 - protein, 8 aa, Homo sapiens
ISYDGSSK

SEQ ID NO: 1151 - protein, 8 aa, Homo sapiens
IWHDGSQK

SEQ ID NO: 1152 - protein, 8 aa, Homo sapiens
FDAEDGET

SEQ ID NO: 1153 - protein, 7 aa, Homo sapiens
IYSGGGT

SEQ ID NO: 1154 - protein, 8 aa, Homo sapiens
LSYDGSNK

SEQ ID NO: 1155 - protein, 8 aa, Homo sapiens
ISYDGSNK

SEQ ID NO: 1156 - protein, 8 aa, Homo sapiens
ISSSSSTI

SEQ ID NO: 1157 - protein, 8 aa, Homo sapiens
ISYDGSIK

SEQ ID NO: 1158 - protein, 7 aa, Homo sapiens
IYYIKNT

SEQ ID NO: 1159 - protein, 8 aa, Homo sapiens
ISSSGSTI

SEQ ID NO: 1160 - protein, 8 aa, Homo sapiens
IIPIFDTT

SEQ ID NO: 1161 - protein, 8 aa, Homo sapiens
ISYDGTNK

SEQ ID NO: 1162 - protein, 8 aa, Homo sapiens
IYPGDSDT

SEQ ID NO: 1163 - protein, 8 aa, Homo sapiens
IWYDGSNK

SEQ ID NO: 1164 - protein, 10 aa, Homo sapiens
IKSKTDGGTT

SEQ ID NO: 1165 - protein, 8 aa, Homo sapiens
IWYDGSNK

SEQ ID NO: 1166 - protein, 7 aa, Homo sapiens
IGTAGDT

SEQ ID NO: 1167 - protein, 8 aa, Homo sapiens
ISYDGSIK

SEQ ID NO: 1168 - protein, 7 aa, Homo sapiens
IYYGGST

SEQ ID NO: 1169 - protein, 13 aa, Homo sapiens
ATDGDDGENWFDP

SEQ ID NO: 1170 - protein, 21 aa, Homo sapiens
ATAGAITGTPRNFYYYYGMDV

SEQ ID NO: 1171 - protein, 14 aa, Homo sapiens
VTSQPFVSPNWFDP

SEQ ID NO: 1172 - protein, 14 aa, Homo sapiens
ATSPAVVERGWFDP

SEQ ID NO: 1173 - protein, 21 aa, Homo sapiens
ATAGAITGTPTNYSYYYGMDF

SEQ ID NO: 1174 - protein, 13 aa, Homo sapiens
TTGPAVTNRPADY

SEQ ID NO: 1175 - protein, 15 aa, Homo sapiens
ATTPAFMAAAGDFDY

SEQ ID NO: 1176 - protein, 8 aa, Homo sapiens
ARGWNYDY

SEQ ID NO: 1177 - protein, 18 aa, Homo sapiens
ARAPEPQSVIYAYWYFDL

SEQ ID NO: 1178 - protein, 19 aa, Homo sapiens
ATGKINYYDSSGYYGTFDY

SEQ ID NO: 1179 - protein, 10 aa, Homo sapiens
ARDTGGIIDY

SEQ ID NO: 1180 - protein, 17 aa, Homo sapiens
ARDGDGLWLGESFYFDD

SEQ ID NO: 1181 - protein, 21 aa, Homo sapiens
ARDSGDDYDSSGYPIGNAFDL

SEQ ID NO: 1182 - protein, 9 aa, Homo sapiens
ATGSVGPDY

SEQ ID NO: 1183 - protein, 13 aa, Homo sapiens
ASFLVGATGQPWY

SEQ ID NO: 1184 - protein, 20 aa, Homo sapiens
ARDGVSVTMVRGVIGPLCDY

SEQ ID NO: 1185 - protein, 20 aa, Homo sapiens
AKDSPYYYDSSGYYPGYFQD

SEQ ID NO: 1186 - protein, 20 aa, Homo sapiens
ARVARRDVAPATIAAYFLDY

SEQ ID NO: 1187 - protein, 15 aa, Homo sapiens
AKGGERWELFTSFDY

SEQ ID NO: 1188 - protein, 23 aa, Homo sapiens
ARERPPFDVVVVPAARPYNWFDP

SEQ ID NO: 1189 - protein, 17 aa, Homo sapiens
ARDWSVVVVPAAPAVDV

SEQ ID NO: 1190 - protein, 16 aa, Homo sapiens
AKVADRVGASTGELDY

SEQ ID NO: 1191 - protein, 20 aa, Homo sapiens
AKVLMMGDSSGFSLGDAFDI

SEQ ID NO: 1192 - protein, 14 aa, Homo sapiens
ARLLYYSDSSPLDS

SEQ ID NO: 1193 - protein, 17 aa, Homo sapiens
ARGPLGSNYFNYDAFDI

SEQ ID NO: 1194 - protein, 16 aa, Homo sapiens
TTEYSSIAARIDAFDI

SEQ ID NO: 1195 - protein, 21 aa, Homo sapiens
ARDLSSSSGWDDYYYYYGMDV

SEQ ID NO: 1196 - protein, 13 aa, Homo sapiens
ARADKNTAMFFDY

SEQ ID NO: 1197 - protein, 13 aa, Homo sapiens
ARDSGDYVDYFDY

SEQ ID NO: 1198 - protein, 12 aa, Homo sapiens
ANLAWLRGYFDY

SEQ ID NO: 1199 - protein, 6 aa, Homo sapiens
QGISSW

SEQ ID NO: 1200 - protein, 11 aa, Homo sapiens
QSLVHSDGNTY

SEQ ID NO: 1201 - protein, 9 aa, Homo sapiens
SRDVGAYNY

SEQ ID NO: 1202 - protein, 9 aa, Homo sapiens
SSDVGGYNY

SEQ ID NO: 1203 - protein, 11 aa, Homo sapiens
QSLVHSDGNTY

SEQ ID NO: 1204 - protein, 9 aa, Homo sapiens
SSNIGASYD

SEQ ID NO: 1205 - protein, 6 aa, Homo sapiens
VLAKKY

SEQ ID NO: 1206 - protein, 9 aa, Homo sapiens
SSDVGSYNL

SEQ ID NO: 1207 - protein, 9 aa, Homo sapiens
SSDVGSYNL

SEQ ID NO: 1208 - protein, 6 aa, Homo sapiens
QGISSY

SEQ ID NO: 1209 - protein, 6 aa, Homo sapiens
KLGDKY

SEQ ID NO: 1210 - protein, 6 aa, Homo sapiens
QSISSW

SEQ ID NO: 1211 - protein, 6 aa, Homo sapiens
QFINSW

SEQ ID NO: 1212 - protein, 6 aa, Homo sapiens
SLRSYY

SEQ ID NO: 1213 - protein, 7 aa, Homo sapiens
QSVSSSY

SEQ ID NO: 1214 - protein, 6 aa, Homo sapiens
QDISNY

SEQ ID NO: 1215 - protein, 6 aa, Homo sapiens
QTISDY

SEQ ID NO: 1216 - protein, 6 aa, Homo sapiens
QSLSSY

SEQ ID NO: 1217 - protein, 9 aa, Homo sapiens
SSDVGGYNY

SEQ ID NO: 1218 - protein, 9 aa, Homo sapiens
SSNIGAGYD

SEQ ID NO: 1219 - protein, 6 aa, Homo sapiens
QGISNY

SEQ ID NO: 1220 - protein, 6 aa, Homo sapiens
QSISNY

SEQ ID NO: 1221 - protein, 6 aa, Homo sapiens
QGISNW

SEQ ID NO: 1222 - protein, 6 aa, Homo sapiens
QSISTY

SEQ ID NO: 1223 - protein, 11 aa, Homo sapiens
QSLEYSDGNTY

SEQ ID NO: 1224 - protein, 6 aa, Homo sapiens
QSISSY

SEQ ID NO: 1225 - protein, 6 aa, Homo sapiens
KLGDKY

SEQ ID NO: 1226 - protein, 6 aa, Homo sapiens
QNINNF

SEQ ID NO: 1227 - protein, 6 aa, Homo sapiens
QSISSY

SEQ ID NO: 1228 - protein, 8 aa, Homo sapiens
SGSIASNY

SEQ ID NO: 1229 - protein, 9 aa, Homo sapiens
QQYNSYPYT

SEQ ID NO: 1230 - protein, 9 aa, Homo sapiens
MQVTQFPYT

SEQ ID NO: 1231 - protein, 10 aa, Homo sapiens
SSYTGSRTLV

SEQ ID NO: 1232 - protein, 9 aa, Homo sapiens
SSYAGSKRV

SEQ ID NO: 1233 - protein, 9 aa, Homo sapiens
MQATQFPYT

SEQ ID NO: 1234 - protein, 12 aa, Homo sapiens
QSYDSSLSYSVV

SEQ ID NO: 1235 - protein, 7 aa, Homo sapiens
YSAAAWV

SEQ ID NO: 1236 - protein, 10 aa, Homo sapiens
YSYAGSSTWV

SEQ ID NO: 1237 - protein, 11 aa, Homo sapiens
CSYAGSSTFYV

SEQ ID NO: 1238 - protein, 9 aa, Homo sapiens
QQLNSYHLT

SEQ ID NO: 1239 - protein, 9 aa, Homo sapiens
QAWDSSTVV

SEQ ID NO: 1240 - protein, 9 aa, Homo sapiens
QQYNSYPVH

SEQ ID NO: 1241 - protein, 9 aa, Homo sapiens
QQYNTYSFT

SEQ ID NO: 1242 - protein, 11 aa, Homo sapiens
NSRDSSGNHQV

SEQ ID NO: 1243 - protein, 9 aa, Homo sapiens
QQYGSSPVT

SEQ ID NO: 1244 - protein, 9 aa, Homo sapiens
QQYDNLPLT

SEQ ID NO: 1245 - protein, 9 aa, Homo sapiens
QQSYITPRT

SEQ ID NO: 1246 - protein, 11 aa, Homo sapiens
QQRSTWPRGFT

SEQ ID NO: 1247 - protein, 10 aa, Homo sapiens
CSYAGSYTFV

SEQ ID NO: 1248 - protein, 12 aa, Homo sapiens
QSYDSSLSGSKV

SEQ ID NO: 1249 - protein, 9 aa, Homo sapiens
QQYNSYPLT

SEQ ID NO: 1250 - protein, 10 aa, Homo sapiens
QQRSNWPPWT

SEQ ID NO: 1251 - protein, 9 aa, Homo sapiens
QQANSFPLT

SEQ ID NO: 1252 - protein, 9 aa, Homo sapiens
QQSHSTPRT

SEQ ID NO: 1253 - protein, 9 aa, Homo sapiens
MQGTHWPLT

SEQ ID NO: 1254 - protein, 10 aa, Homo sapiens
QQSYSTPRLT

SEQ ID NO: 1255 - protein, 11 aa, Homo sapiens
QAWDSSTSYVV

SEQ ID NO: 1256 - protein, 10 aa, Homo sapiens
QQSYSTPGGT

SEQ ID NO: 1257 - protein, 10 aa, Homo sapiens
QQSYSSPPLT

SEQ ID NO: 1258 - protein, 9 aa, Homo sapiens
QSYDSSNWV

1. An isolated recombinant monoclonal antibody, or an antigen-binding fragment thereof, that binds to a coronavirus, wherein said antibody comprises a heavy chain variable domain and a light chain variable domain,
(1) wherein the heavy chain variable domain comprises a complementarity determining region 1 (CDR1) comprising the amino acid sequence of SEQ ID NO:3; a CDR2 comprising the amino acid sequence of SEQ ID NO:4; and a CDR3 comprising the amino acid sequence of SEQ ID NO:5; and wherein the light chain variable domain comprises: a CDR1 comprising the amino acid sequence of SEQ ID NO:8; a CDR2 comprising the amino acid sequence of SEQ ID NO:9; and a CDR3 comprising the amino acid sequence of SEQ ID NO:10;
(2) wherein the heavy chain variable domain comprises a CDR1 comprising the amino acid sequence of SEQ ID NO:13; a CDR2 comprising the amino acid sequence of SEQ ID NO:14; and a CDR3 comprising the amino acid sequence of SEQ ID NO:15; and wherein the light chain variable domain comprises: a CDR1 comprising the amino acid sequence of SEQ ID NO:18; a CDR2 comprising the amino acid sequence of SEQ ID NO:19; and a CDR3 comprising the amino acid sequence of SEQ ID NO:20;
(3) wherein the heavy chain variable domain comprises a CDR1 comprising the amino acid sequence of SEQ ID NO:23; a CDR2 comprising the amino acid sequence of SEQ ID NO:24; and a CDR3 comprising the amino acid sequence of SEQ ID NO:25; and wherein the light chain variable domain comprises: a CDR1 comprising the amino acid sequence of SEQ ID NO:28; a CDR2 comprising the amino acid sequence of SEQ ID NO:29; and a CDR3 comprising the amino acid sequence of SEQ ID NO:30;
(4) wherein the heavy chain variable domain comprises a CDR1 comprising the amino acid sequence of SEQ ID NO:33; a CDR2 comprising the amino acid sequence of SEQ ID NO:34; and a CDR3 comprising the amino acid sequence of SEQ ID NO:35; and wherein the light chain variable domain comprises: a CDR1 comprising the amino acid sequence of SEQ ID NO:38; a CDR2 comprising the amino acid sequence of SEQ ID NO:39; and a CDR3 comprising the amino acid sequence of SEQ ID NO:40;
(5) wherein the heavy chain variable domain comprises a CDR1 comprising the amino acid sequence of SEQ ID NO:43; a CDR2 comprising the amino acid sequence of SEQ ID NO:44; and a CDR3 comprising the amino acid sequence of SEQ ID NO:45; and wherein the light chain variable domain comprises: a CDR1 comprising the amino acid sequence of SEQ ID NO:48; a CDR2 comprising the amino acid sequence of SEQ ID NO:49; and a CDR3 comprising the amino acid sequence of SEQ ID NO:50;
(6) wherein the heavy chain variable domain comprises a CDR1 comprising the amino acid sequence of SEQ ID NO:53; a CDR2 comprising the amino acid sequence of SEQ ID NO:54; and a CDR3 comprising the amino acid sequence of SEQ ID NO:55; and wherein the light chain variable domain comprises: a CDR1 comprising the amino acid sequence of SEQ ID NO:58; a CDR2 comprising the amino acid sequence of SEQ ID NO:59; and a CDR3 comprising the amino acid sequence of SEQ ID NO:60;
(7) wherein the heavy chain variable domain comprises a CDR1 comprising the amino acid sequence of SEQ ID NO:63; a CDR2 comprising the amino acid sequence of SEQ ID NO:64; and a CDR3 comprising the amino acid sequence of SEQ ID NO:65; and wherein the light chain variable domain comprises: a CDR1 comprising the amino acid sequence of SEQ ID NO:68; a CDR2 comprising the amino acid sequence of SEQ ID NO:69; and a CDR3 comprising the amino acid sequence of SEQ ID NO:70;
(8) wherein the heavy chain variable domain comprises a CDR1 comprising the amino acid sequence of SEQ ID NO:73; a CDR2 comprising the amino acid sequence of SEQ ID NO:74; and a CDR3 comprising the amino acid sequence of SEQ ID NO:75; and wherein the light chain variable domain comprises: a CDR1 comprising the amino acid sequence of SEQ ID NO:78; a CDR2 comprising the amino acid sequence of SEQ ID NO:79; and a CDR3 comprising the amino acid sequence of SEQ ID NO:80;
(9) wherein the heavy chain variable domain comprises a CDR1 comprising the amino acid sequence of SEQ ID NO:83; a CDR2 comprising the amino acid sequence of SEQ ID NO:84; and a CDR3 comprising the amino acid sequence of SEQ ID NO:85; and wherein the light chain variable domain comprises: a CDR1 comprising the amino acid sequence of SEQ ID NO:88; a CDR2 comprising the amino acid sequence of SEQ ID NO:89; and a CDR3 comprising the amino acid sequence of SEQ ID NO:90;
(10) wherein the heavy chain variable domain comprises a CDR1 comprising the amino acid sequence of SEQ ID NO:93; a CDR2 comprising the amino acid sequence of SEQ ID NO:94; and a CDR3 comprising the amino acid sequence of SEQ ID NO:95; and wherein the light chain variable domain comprises: a CDR1 comprising the amino acid sequence of SEQ ID NO:98; a CDR2 comprising the amino acid sequence of SEQ ID NO:99; and a CDR3 comprising the amino acid sequence of SEQ ID NO:100;
(11) wherein the heavy chain variable domain comprises a CDR1 comprising the amino acid sequence of SEQ ID NO:103; a CDR2 comprising the amino acid sequence of SEQ ID NO:104; and a CDR3 comprising the amino acid sequence of SEQ ID NO:105; and wherein the light chain variable domain comprises: a CDR1 comprising the amino acid sequence of SEQ ID NO:108; a CDR2 comprising the amino acid sequence of SEQ ID NO:109; and a CDR3 comprising the amino acid sequence of SEQ ID NO:110;
(12) wherein the heavy chain variable domain comprises a CDR1 comprising the amino acid sequence of SEQ ID NO:113; a CDR2 comprising the amino acid sequence of SEQ ID NO:114; and a CDR3 comprising the amino acid sequence of SEQ ID NO:115; and wherein the light chain variable domain comprises: a CDR1 comprising the amino acid sequence of SEQ ID NO:118; a CDR2 comprising the amino acid sequence of SEQ ID NO:119; and a CDR3 comprising the amino acid sequence of SEQ ID NO:120;
(13) wherein the heavy chain variable domain comprises a CDR1 comprising the amino acid sequence of SEQ ID NO:123; a CDR2 comprising the amino acid sequence of SEQ ID NO:124; and a CDR3 comprising the amino acid sequence of SEQ ID NO:125; and wherein the light chain variable domain comprises: a CDR1 comprising the amino acid sequence of SEQ ID NO:128; a CDR2 comprising the amino acid sequence of SEQ ID NO:129; and a CDR3 comprising the amino acid sequence of SEQ ID NO:130;
(14) wherein the heavy chain variable domain comprises a CDR1 comprising the amino acid sequence of SEQ ID NO:133; a CDR2 comprising the amino acid sequence of SEQ ID NO:134; and a CDR3 comprising the amino acid sequence of SEQ ID NO:135; and wherein the light chain variable domain comprises: a CDR1 comprising the amino acid sequence of SEQ ID NO:138; a CDR2 comprising the amino acid sequence of SEQ ID NO:139; and a CDR3 comprising the amino acid sequence of SEQ ID NO:140;
(15) wherein the heavy chain variable domain comprises a CDR1 comprising the amino acid sequence of SEQ ID NO:143; a CDR2 comprising the amino acid sequence of SEQ ID NO:144; and a CDR3 comprising the amino acid sequence of SEQ ID NO:145; and wherein the light chain variable domain comprises: a CDR1 comprising the amino acid sequence of SEQ ID NO:148; a CDR2 comprising the amino acid sequence of SEQ ID NO149; and a CDR3 comprising the amino acid sequence of SEQ ID NO:150;
(16) wherein the heavy chain variable domain comprises a CDR1 comprising the amino acid sequence of SEQ ID NO:153; a CDR2 comprising the amino acid sequence of SEQ ID NO:154; and a CDR3 comprising the amino acid sequence of SEQ ID NO:155; and wherein the light chain variable domain comprises: a CDR1 comprising the amino acid sequence of SEQ ID NO:158; a CDR2 comprising the amino acid sequence of SEQ ID NO:159; and a CDR3 comprising the amino acid sequence of SEQ ID NO:160;
(17) wherein the heavy chain variable domain comprises a CDR1 comprising the amino acid sequence of SEQ ID NO:163; a CDR2 comprising the amino acid sequence of SEQ ID NO:164; and a CDR3 comprising the amino acid sequence of SEQ ID NO:165; and wherein the light chain variable domain comprises: a CDR1 comprising the amino acid sequence of SEQ ID NO:168; a CDR2 comprising the amino acid sequence of SEQ ID NO:169; and a CDR3 comprising the amino acid sequence of SEQ ID NO:170;
(18) wherein the heavy chain variable domain comprises a CDR1 comprising the amino acid sequence of SEQ ID NO:173; a CDR2 comprising the amino acid sequence of SEQ ID NO:174; and a CDR3 comprising the amino acid sequence of SEQ ID NO:175; and wherein the light chain variable domain comprises: a CDR1 comprising the amino acid sequence of SEQ ID NO:178; a CDR2 comprising the amino acid sequence of SEQ ID NO:179; and a CDR3 comprising the amino acid sequence of SEQ ID NO:180;
(19) wherein the heavy chain variable domain comprises a CDR1 comprising the amino acid sequence of SEQ ID NO:183; a CDR2 comprising the amino acid sequence of SEQ ID NO:184; and a CDR3 comprising the amino acid sequence of SEQ ID NO:185; and wherein the light chain variable domain comprises: a CDR1 comprising the amino acid sequence of SEQ ID NO:188; a CDR2 comprising the amino acid sequence of SEQ ID NO:189; and a CDR3 comprising the amino acid sequence of SEQ ID NO:190;
(20) wherein the heavy chain variable domain comprises a CDR1 comprising the amino acid sequence of SEQ ID NO:193; a CDR2 comprising the amino acid sequence of SEQ ID NO:194; and a CDR3 comprising the amino acid sequence of SEQ ID NO:195; and wherein the light chain variable domain comprises: a CDR1 comprising the amino acid sequence of SEQ ID NO:198; a CDR2 comprising the amino acid sequence of SEQ ID NO:199; and a CDR3 comprising the amino acid sequence of SEQ ID NO:200;
(21) wherein the heavy chain variable domain comprises a CDR1 comprising the amino acid sequence of SEQ ID NO:203; a CDR2 comprising the amino acid sequence of SEQ ID NO:204; and a CDR3 comprising the amino acid sequence of SEQ ID NO:205; and wherein the light chain variable domain comprises: a CDR1 comprising the amino acid sequence of SEQ ID NO:208; a CDR2 comprising the amino acid sequence of SEQ ID NO:209; and a CDR3 comprising the amino acid sequence of SEQ ID NO:210;
(22) wherein the heavy chain variable domain comprises a CDR1 comprising the amino acid sequence of SEQ ID NO:213; a CDR2 comprising the amino acid sequence of SEQ ID NO:214; and a CDR3 comprising the amino acid sequence of SEQ ID NO:215; and wherein the light chain variable domain comprises: a CDR1 comprising the amino acid sequence of SEQ ID NO:218; a CDR2 comprising the amino acid sequence of SEQ ID NO:219; and a CDR3 comprising the amino acid sequence of SEQ ID NO:220;
(23) wherein the heavy chain variable domain comprises a CDR1 comprising the amino acid sequence of SEQ ID NO:223; a CDR2 comprising the amino acid sequence of SEQ ID NO:224; and a CDR3 comprising the amino acid sequence of SEQ ID NO:225; and wherein the light chain variable domain comprises: a CDR1 comprising the amino acid sequence of SEQ ID NO:228; a CDR2 comprising the amino acid sequence of SEQ ID NO:229; and a CDR3 comprising the amino acid sequence of SEQ ID NO:230;
(24) wherein the heavy chain variable domain comprises a CDR1 comprising the amino acid sequence of SEQ ID NO:233; a CDR2 comprising the amino acid sequence of SEQ ID NO:234; and a CDR3 comprising the amino acid sequence of SEQ ID NO:235; and wherein the light chain variable domain comprises: a CDR1 comprising the amino acid sequence of SEQ ID NO:238; a CDR2 comprising the amino acid sequence of SEQ ID NO:239; and a CDR3 comprising the amino acid sequence of SEQ ID NO:240;
(25) wherein the heavy chain variable domain comprises a CDR1 comprising the amino acid sequence of SEQ ID NO:243; a CDR2 comprising the amino acid sequence of SEQ ID NO:244; and a CDR3 comprising the amino acid sequence of SEQ ID NO:245; and wherein the light chain variable domain comprises: a CDR1 comprising the amino acid sequence of SEQ ID NO:248; a CDR2 comprising the amino acid sequence of SEQ ID NO:249; and a CDR3 comprising the amino acid sequence of SEQ ID NO:250;
(26) wherein the heavy chain variable domain comprises a CDR1 comprising the amino acid sequence of SEQ ID NO:253; a CDR2 comprising the amino acid sequence of SEQ ID NO:254; and a CDR3 comprising the amino acid sequence of SEQ ID NO:255; and wherein the light chain variable domain comprises: a CDR1 comprising the amino acid sequence of SEQ ID NO:258; a CDR2 comprising the amino acid sequence of SEQ ID NO:259; and a CDR3 comprising the amino acid sequence of SEQ ID NO:260;
(27) wherein the heavy chain variable domain comprises a CDR1 comprising the amino acid sequence of SEQ ID NO:263; a CDR2 comprising the amino acid sequence of SEQ ID NO:264; and a CDR3 comprising the amino acid sequence of SEQ ID NO:265; and wherein the light chain variable domain comprises: a CDR1 comprising the amino acid sequence of SEQ ID NO:268; a CDR2 comprising the amino acid sequence of SEQ ID NO:269; and a CDR3 comprising the amino acid sequence of SEQ ID NO:270;
(28) wherein the heavy chain variable domain comprises a CDR1 comprising the amino acid sequence of SEQ ID NO:273; a CDR2 comprising the amino acid sequence of SEQ ID NO:274; and a CDR3 comprising the amino acid sequence of SEQ ID NO:275; and wherein the light chain variable domain comprises: a CDR1 comprising the amino acid sequence of SEQ ID NO:278; a CDR2 comprising the amino acid sequence of SEQ ID NO:279; and a CDR3 comprising the amino acid sequence of SEQ ID NO:280;
(29) wherein the heavy chain variable domain comprises a CDR1 comprising the amino acid sequence of SEQ ID NO:283; a CDR2 comprising the amino acid sequence of SEQ ID NO:284; and a CDR3 comprising the amino acid sequence of SEQ ID NO:285; and wherein the light chain variable domain comprises: a CDR1 comprising the amino acid sequence of SEQ ID NO:288; a CDR2 comprising the amino acid sequence of SEQ ID NO:289; and a CDR3 comprising the amino acid sequence of SEQ ID NO:290;
(30) wherein the heavy chain variable domain comprises a CDR1 comprising the amino acid sequence of SEQ ID NO:293; a CDR2 comprising the amino acid sequence of SEQ ID NO:294; and a CDR3 comprising the amino acid sequence of SEQ ID NO:295; and wherein the light chain variable domain comprises: a CDR1 comprising the amino acid sequence of SEQ ID NO:298; a CDR2 comprising the amino acid sequence of SEQ ID NO:299; and a CDR3 comprising the amino acid sequence of SEQ ID NO:300;
(31) wherein the heavy chain variable domain comprises a CDR1 comprising the amino acid sequence of SEQ ID NO:303; a CDR2 comprising the amino acid sequence of SEQ ID NO:304; and a CDR3 comprising the amino acid sequence of SEQ ID NO:305; and wherein the light chain variable domain comprises: a CDR1 comprising the amino acid sequence of SEQ ID NO:308; a CDR2 comprising the amino acid sequence of SEQ ID NO:309; and a CDR3 comprising the amino acid sequence of SEQ ID NO:310;
(32) wherein the heavy chain variable domain comprises a CDR1 comprising the amino acid sequence of SEQ ID NO:313; a CDR2 comprising the amino acid sequence of SEQ ID NO:314; and a CDR3 comprising the amino acid sequence of SEQ ID NO:315; and wherein the light chain variable domain comprises: a CDR1 comprising the amino acid sequence of SEQ ID NO:318; a CDR2 comprising the amino acid sequence of SEQ ID NO:319; and a CDR3 comprising the amino acid sequence of SEQ ID NO:320;
(33) wherein the heavy chain variable domain comprises a CDR1 comprising the amino acid sequence of SEQ ID NO:323; a CDR2 comprising the amino acid sequence of SEQ ID NO:324; and a CDR3 comprising the amino acid sequence of SEQ ID NO:325; and wherein the light chain variable domain comprises: a CDR1 comprising the amino acid sequence of SEQ ID NO:328; a CDR2 comprising the amino acid sequence of SEQ ID NO:329; and a CDR3 comprising the amino acid sequence of SEQ ID NO:330;
(34) wherein the heavy chain variable domain comprises a CDR1 comprising the amino acid sequence of SEQ ID NO:333; a CDR2 comprising the amino acid sequence of SEQ ID NO:334; and a CDR3 comprising the amino acid sequence of SEQ ID NO:335; and wherein the light chain variable domain comprises: a CDR1 comprising the amino acid sequence of SEQ ID NO:338; a CDR2 comprising the amino acid sequence of SEQ ID NO:339; and a CDR3 comprising the amino acid sequence of SEQ ID NO:340;
(35) wherein the heavy chain variable domain comprises a CDR1 comprising the amino acid sequence of SEQ ID NO:343; a CDR2 comprising the amino acid sequence of SEQ ID NO:344; and a CDR3 comprising the amino acid sequence of SEQ ID NO:345; and wherein the light chain variable domain comprises: a CDR1 comprising the amino acid sequence of SEQ ID NO:348; a CDR2 comprising the amino acid sequence of SEQ ID NO:349; and a CDR3 comprising the amino acid sequence of SEQ ID NO:350;
(36) wherein the heavy chain variable domain comprises a CDR1 comprising the amino acid sequence of SEQ ID NO:353; a CDR2 comprising the amino acid sequence of SEQ ID NO:354; and a CDR3 comprising the amino acid sequence of SEQ ID NO:355; and wherein the light chain variable domain comprises: a CDR1 comprising the amino acid sequence of SEQ ID NO:358; a CDR2 comprising the amino acid sequence of SEQ ID NO:359; and a CDR3 comprising the amino acid sequence of SEQ ID NO:360;
(37) wherein the heavy chain variable domain comprises a CDR1 comprising the amino acid sequence of SEQ ID NO:363; a CDR2 comprising the amino acid sequence of SEQ ID NO:364; and a CDR3 comprising the amino acid sequence of SEQ ID NO:365; and wherein the light chain variable domain comprises: a CDR1 comprising the amino acid sequence of SEQ ID NO:368; a CDR2 comprising the amino acid sequence of SEQ ID NO:369; and a CDR3 comprising the amino acid sequence of SEQ ID NO:370;
(38) wherein the heavy chain variable domain comprises a CDR1 comprising the amino acid sequence of SEQ ID NO:373; a CDR2 comprising the amino acid sequence of SEQ ID NO:374; and a CDR3 comprising the amino acid sequence of SEQ ID NO:375; and wherein the light chain variable domain comprises: a CDR1 comprising the amino acid sequence of SEQ ID NO:378; a CDR2 comprising the amino acid sequence of SEQ ID NO:379; and a CDR3 comprising the amino acid sequence of SEQ ID NO:380;
(39) wherein the heavy chain variable domain comprises a CDR1 comprising the amino acid sequence of SEQ ID NO:383; a CDR2 comprising the amino acid sequence of SEQ ID NO:384; and a CDR3 comprising the amino acid sequence of SEQ ID NO:385; and wherein the light chain variable domain comprises: a CDR1 comprising the amino acid sequence of SEQ ID NO:388; a CDR2 comprising the amino acid sequence of SEQ ID NO:389; and a CDR3 comprising the amino acid sequence of SEQ ID NO:390;
(40) wherein the heavy chain variable domain comprises a CDR1 comprising the amino acid sequence of SEQ ID NO:393; a CDR2 comprising the amino acid sequence of SEQ ID NO:394; and a CDR3 comprising the amino acid sequence of SEQ ID NO:395; and wherein the light chain variable domain comprises: a CDR1 comprising the amino acid sequence of SEQ ID NO:398; a CDR2 comprising the amino acid sequence of SEQ ID NO:399; and a CDR3 comprising the amino acid sequence of SEQ ID NO:400;
(41) wherein the heavy chain variable domain comprises a CDR1 comprising the amino acid sequence of SEQ ID NO:403; a CDR2 comprising the amino acid sequence of SEQ ID NO:404; and a CDR3 comprising the amino acid sequence of SEQ ID NO:405; and wherein the light chain variable domain comprises: a CDR1 comprising the amino acid sequence of SEQ ID NO:408; a CDR2 comprising the amino acid sequence of SEQ ID NO:409; and a CDR3 comprising the amino acid sequence of SEQ ID NO:410;
(42) wherein the heavy chain variable domain comprises a CDR1 comprising the amino acid sequence of SEQ ID NO:413; a CDR2 comprising the amino acid sequence of SEQ ID NO:414; and a CDR3 comprising the amino acid sequence of SEQ ID NO:415; and wherein the light chain variable domain comprises: a CDR1 comprising the amino acid sequence of SEQ ID NO:418; a CDR2 comprising the amino acid sequence of SEQ ID NO:419; and a CDR3 comprising the amino acid sequence of SEQ ID NO:420;
(43) wherein the heavy chain variable domain comprises a CDR1 comprising the amino acid sequence of SEQ ID NO:423; a CDR2 comprising the amino acid sequence of SEQ ID NO:424; and a CDR3 comprising the amino acid sequence of SEQ ID NO:425; and wherein the light chain variable domain comprises: a CDR1 comprising the amino acid sequence of SEQ ID NO:428; a CDR2 comprising the amino acid sequence of SEQ ID NO:429; and a CDR3 comprising the amino acid sequence of SEQ ID NO:430;
(44) wherein the heavy chain variable domain comprises a CDR1 comprising the amino acid sequence of SEQ ID NO:433; a CDR2 comprising the amino acid sequence of SEQ ID NO:434; and a CDR3 comprising the amino acid sequence of SEQ ID NO:435; and wherein the light chain variable domain comprises: a CDR1 comprising the amino acid sequence of SEQ ID NO:438; a CDR2 comprising the amino acid sequence of SEQ ID NO:439; and a CDR3 comprising the amino acid sequence of SEQ ID NO:440;
(45) wherein the heavy chain variable domain comprises a CDR1 comprising the amino acid sequence of SEQ ID NO:443; a CDR2 comprising the amino acid sequence of SEQ ID NO:444; and a CDR3 comprising the amino acid sequence of SEQ ID NO:445; and wherein the light chain variable domain comprises: a CDR1 comprising the amino acid sequence of SEQ ID NO:448; a CDR2 comprising the amino acid sequence of SEQ ID NO:449; and a CDR3 comprising the amino acid sequence of SEQ ID NO:450;
(46) wherein the heavy chain variable domain comprises a CDR1 comprising the amino acid sequence of SEQ ID NO:453; a CDR2 comprising the amino acid sequence of SEQ ID NO:454; and a CDR3 comprising the amino acid sequence of SEQ ID NO:455; and wherein the light chain variable domain comprises: a CDR1 comprising the amino acid sequence of SEQ ID NO:458; a CDR2 comprising the amino acid sequence of SEQ ID NO:459; and a CDR3 comprising the amino acid sequence of SEQ ID NO:460;
(47) wherein the heavy chain variable domain comprises a CDR1 comprising the amino acid sequence of SEQ ID NO:463; a CDR2 comprising the amino acid sequence of SEQ ID NO:464; and a CDR3 comprising the amino acid sequence of SEQ ID NO:465; and wherein the light chain variable domain comprises: a CDR1 comprising the amino acid sequence of SEQ ID NO:468; a CDR2 comprising the amino acid sequence of SEQ ID NO:469; and a CDR3 comprising the amino acid sequence of SEQ ID NO:470;
(48) wherein the heavy chain variable domain comprises a CDR1 comprising the amino acid sequence of SEQ ID NO:473; a CDR2 comprising the amino acid sequence of SEQ ID NO:474; and a CDR3 comprising the amino acid sequence of SEQ ID NO:475; and wherein the light chain variable domain comprises: a CDR1 comprising the amino acid sequence of SEQ ID NO:478; a CDR2 comprising the amino acid sequence of SEQ ID NO:479; and a CDR3 comprising the amino acid sequence of SEQ ID NO:480;
(49) wherein the heavy chain variable domain comprises a CDR1 comprising the amino acid sequence of SEQ ID NO:483; a CDR2 comprising the amino acid sequence of SEQ ID NO:484; and a CDR3 comprising the amino acid sequence of SEQ ID NO:485; and wherein the light chain variable domain comprises: a CDR1 comprising the amino acid sequence of SEQ ID NO:488; a CDR2 comprising the amino acid sequence of SEQ ID NO:489; and a CDR3 comprising the amino acid sequence of SEQ ID NO:490;
(50) wherein the heavy chain variable domain comprises a CDR1 comprising the amino acid sequence of SEQ ID NO:493; a CDR2 comprising the amino acid sequence of SEQ ID NO:494; and a CDR3 comprising the amino acid sequence of SEQ ID NO:495; and wherein the light chain variable domain comprises: a CDR1 comprising the amino acid sequence of SEQ ID NO:498; a CDR2 comprising the amino acid sequence of SEQ ID NO:499; and a CDR3 comprising the amino acid sequence of SEQ ID NO:500;
(51) wherein the heavy chain variable domain comprises a CDR1 comprising the amino acid sequence of SEQ ID NO:503; a CDR2 comprising the amino acid sequence of SEQ ID NO:504; and a CDR3 comprising the amino acid sequence of SEQ ID NO:505; and wherein the light chain variable domain comprises: a CDR1 comprising the amino acid sequence of SEQ ID NO:508; a CDR2 comprising the amino acid sequence of SEQ ID NO:509; and a CDR3 comprising the amino acid sequence of SEQ ID NO:510;
(52) wherein the heavy chain variable domain comprises a CDR1 comprising the amino acid sequence of SEQ ID NO:513; a CDR2 comprising the amino acid sequence of SEQ ID NO:514; and a CDR3 comprising the amino acid sequence of SEQ ID NO:515; and wherein the light chain variable domain comprises: a CDR1 comprising the amino acid sequence of SEQ ID NO:518; a CDR2 comprising the amino acid sequence of SEQ ID NO:519; and a CDR3 comprising the amino acid sequence of SEQ ID NO:520;
(53) wherein the heavy chain variable domain comprises a CDR1 comprising the amino acid sequence of SEQ ID NO:523; a CDR2 comprising the amino acid sequence of SEQ ID NO:524; and a CDR3 comprising the amino acid sequence of SEQ ID NO:525; and wherein the light chain variable domain comprises: a CDR1 comprising the amino acid sequence of SEQ ID NO:528; a CDR2 comprising the amino acid sequence of SEQ ID NO:529; and a CDR3 comprising the amino acid sequence of SEQ ID NO:530;
(54) wherein the heavy chain variable domain comprises a CDR1 comprising the amino acid sequence of SEQ ID NO:533; a CDR2 comprising the amino acid sequence of SEQ ID NO:534; and a CDR3 comprising the amino acid sequence of SEQ ID NO:535; and wherein the light chain variable domain comprises: a CDR1 comprising the amino acid sequence of SEQ ID NO:538; a CDR2 comprising the amino acid sequence of SEQ ID NO:539; and a CDR3 comprising the amino acid sequence of SEQ ID NO:540;
(55) wherein the heavy chain variable domain comprises a CDR1 comprising the amino acid sequence of SEQ ID NO:543; a CDR2 comprising the amino acid sequence of SEQ ID NO:544; and a CDR3 comprising the amino acid sequence of SEQ ID NO:545; and wherein the light chain variable domain comprises: a CDR1 comprising the amino acid sequence of SEQ ID NO:548; a CDR2 comprising the amino acid sequence of SEQ ID NO:549; and a CDR3 comprising the amino acid sequence of SEQ ID NO:550;
(56) wherein the heavy chain variable domain comprises a CDR1 comprising the amino acid sequence of SEQ ID NO:553; a CDR2 comprising the amino acid sequence of SEQ ID NO:554; and a CDR3 comprising the amino acid sequence of SEQ ID NO:555; and wherein the light chain variable domain comprises: a CDR1 comprising the amino acid sequence of SEQ ID NO:558; a CDR2 comprising the amino acid sequence of SEQ ID NO:559; and a CDR3 comprising the amino acid sequence of SEQ ID NO:560;
(57) wherein the heavy chain variable domain comprises a CDR1 comprising the amino acid sequence of SEQ ID NO:563; a CDR2 comprising the amino acid sequence of SEQ ID NO:564; and a CDR3 comprising the amino acid sequence of SEQ ID NO:565; and wherein the light chain variable domain comprises: a CDR1 comprising the amino acid sequence of SEQ ID NO:568; a CDR2 comprising the amino acid sequence of SEQ ID NO:569; and a CDR3 comprising the amino acid sequence of SEQ ID NO:570;
(58) wherein the heavy chain variable domain comprises a CDR1 comprising the amino acid sequence of SEQ ID NO:573; a CDR2 comprising the amino acid sequence of SEQ ID NO:574; and a CDR3 comprising the amino acid sequence of SEQ ID NO:575; and wherein the light chain variable domain comprises: a CDR1 comprising the amino acid sequence of SEQ ID NO:578; a CDR2 comprising the amino acid sequence of SEQ ID NO:579; and a CDR3 comprising the amino acid sequence of SEQ ID NO:580;
(59) wherein the heavy chain variable domain comprises a CDR1 comprising the amino acid sequence of SEQ ID NO:583; a CDR2 comprising the amino acid sequence of SEQ ID NO:584; and a CDR3 comprising the amino acid sequence of SEQ ID NO:585; and wherein the light chain variable domain comprises: a CDR1 comprising the amino acid sequence of SEQ ID NO:588; a CDR2 comprising the amino acid sequence of SEQ ID NO:589; and a CDR3 comprising the amino acid sequence of SEQ ID NO:590;
(60) wherein the heavy chain variable domain comprises a CDR1 comprising the amino acid sequence of SEQ ID NO:593; a CDR2 comprising the amino acid sequence of SEQ ID NO:594; and a CDR3 comprising the amino acid sequence of SEQ ID NO:595; and wherein the light chain variable domain comprises: a CDR1 comprising the amino acid sequence of SEQ ID NO:598; a CDR2 comprising the amino acid sequence of SEQ ID NO:599; and a CDR3 comprising the amino acid sequence of SEQ ID NO:600;
(61) wherein the heavy chain variable domain comprises a CDR1 comprising the amino acid sequence of SEQ ID NO:603; a CDR2 comprising the amino acid sequence of SEQ ID NO:604; and a CDR3 comprising the amino acid sequence of SEQ ID NO:605; and wherein the light chain variable domain comprises: a CDR1 comprising the amino acid sequence of SEQ ID NO:608; a CDR2 comprising the amino acid sequence of SEQ ID NO:609; and a CDR3 comprising the amino acid sequence of SEQ ID NO:610;
(62) wherein the heavy chain variable domain comprises a CDR1 comprising the amino acid sequence of SEQ ID NO:613; a CDR2 comprising the amino acid sequence of SEQ ID NO:614; and a CDR3 comprising the amino acid sequence of SEQ ID NO:615; and wherein the light chain variable domain comprises: a CDR1 comprising the amino acid sequence of SEQ ID NO:618; a CDR2 comprising the amino acid sequence of SEQ ID NO:619; and a CDR3 comprising the amino acid sequence of SEQ ID NO:620;
(63) wherein the heavy chain variable domain comprises a CDR1 comprising the amino acid sequence of SEQ ID NO:623; a CDR2 comprising the amino acid sequence of SEQ ID NO:624; and a CDR3 comprising the amino acid sequence of SEQ ID NO:625; and wherein the light chain variable domain comprises: a CDR1 comprising the amino acid sequence of SEQ ID NO:628; a CDR2 comprising the amino acid sequence of SEQ ID NO:629; and a CDR3 comprising the amino acid sequence of SEQ ID NO:630;
(64) wherein the heavy chain variable domain comprises a CDR1 comprising the amino acid sequence of SEQ ID NO:633; a CDR2 comprising the amino acid sequence of SEQ ID NO:634; and a CDR3 comprising the amino acid sequence of SEQ ID NO:635; and wherein the light chain variable domain comprises: a CDR1 comprising the amino acid sequence of SEQ ID NO:638; a CDR2 comprising the amino acid sequence of SEQ ID NO:639; and a CDR3 comprising the amino acid sequence of SEQ ID NO:640;
(65) wherein the heavy chain variable domain comprises a CDR1 comprising the amino acid sequence of SEQ ID NO:643; a CDR2 comprising the amino acid sequence of SEQ ID NO:644; and a CDR3 comprising the amino acid sequence of SEQ ID NO:645; and wherein the light chain variable domain comprises: a CDR1 comprising the amino acid sequence of SEQ ID NO:648; a CDR2 comprising the amino acid sequence of SEQ ID NO:649; and a CDR3 comprising the amino acid sequence of SEQ ID NO:650;
(66) wherein the heavy chain variable domain comprises a CDR1 comprising the amino acid sequence of SEQ ID NO:653; a CDR2 comprising the amino acid sequence of SEQ ID NO:654; and a CDR3 comprising the amino acid sequence of SEQ ID NO:655; and wherein the light chain variable domain comprises: a CDR1 comprising the amino acid sequence of SEQ ID NO:658; a CDR2 comprising the amino acid sequence of SEQ ID NO:659; and a CDR3 comprising the amino acid sequence of SEQ ID NO:660;
(67) wherein the heavy chain variable domain comprises a CDR1 comprising the amino acid sequence of SEQ ID NO:663; a CDR2 comprising the amino acid sequence of SEQ ID NO:664; and a CDR3 comprising the amino acid sequence of SEQ ID NO:665; and wherein the light chain variable domain comprises: a CDR1 comprising the amino acid sequence of SEQ ID NO:668; a CDR2 comprising the amino acid sequence of SEQ ID NO:669; and a CDR3 comprising the amino acid sequence of SEQ ID NO:670;
(68) wherein the heavy chain variable domain comprises a CDR1 comprising the amino acid sequence of SEQ ID NO:673; a CDR2 comprising the amino acid sequence of SEQ ID NO:674; and a CDR3 comprising the amino acid sequence of SEQ ID NO:675; and wherein the light chain variable domain comprises: a CDR1 comprising the amino acid sequence of SEQ ID NO:678; a CDR2 comprising the amino acid sequence of SEQ ID NO:679; and a CDR3 comprising the amino acid sequence of SEQ ID NO:680;
(69) wherein the heavy chain variable domain comprises a CDR1 comprising the amino acid sequence of SEQ ID NO:683; a CDR2 comprising the amino acid sequence of SEQ ID NO:684; and a CDR3 comprising the amino acid sequence of SEQ ID NO:685; and wherein the light chain variable domain comprises: a CDR1 comprising the amino acid sequence of SEQ ID NO:688; a CDR2 comprising the amino acid sequence of SEQ ID NO:689; and a CDR3 comprising the amino acid sequence of SEQ ID NO:690;
(70) wherein the heavy chain variable domain comprises a CDR1 comprising the amino acid sequence of SEQ ID NO:693; a CDR2 comprising the amino acid sequence of SEQ ID NO:694; and a CDR3 comprising the amino acid sequence of SEQ ID NO:695; and wherein the light chain variable domain comprises: a CDR1 comprising the amino acid sequence of SEQ ID NO:698; a CDR2 comprising the amino acid sequence of SEQ ID NO:699; and a CDR3 comprising the amino acid sequence of SEQ ID NO:700;
(71) wherein the heavy chain variable domain comprises a CDR1 comprising the amino acid sequence of SEQ ID NO:703; a CDR2 comprising the amino acid sequence of SEQ ID NO:704; and a CDR3 comprising the amino acid sequence of SEQ ID NO:705; and wherein the light chain variable domain comprises: a CDR1 comprising the amino acid sequence of SEQ ID NO:708; a CDR2 comprising the amino acid sequence of SEQ ID NO:709; and a CDR3 comprising the amino acid sequence of SEQ ID NO:710;
(72) wherein the heavy chain variable domain comprises a CDR1 comprising the amino acid sequence of SEQ ID NO:713; a CDR2 comprising the amino acid sequence of SEQ ID NO:714; and a CDR3 comprising the amino acid sequence of SEQ ID NO:715; and wherein the light chain variable domain comprises: a CDR1 comprising the amino acid sequence of SEQ ID NO:718; a CDR2 comprising the amino acid sequence of SEQ ID NO:719; and a CDR3 comprising the amino acid sequence of SEQ ID NO:720;
(73) wherein the heavy chain variable domain comprises a CDR1 comprising the amino acid sequence of SEQ ID NO:723; a CDR2 comprising the amino acid sequence of SEQ ID NO:724; and a CDR3 comprising the amino acid sequence of SEQ ID NO:725; and wherein the light chain variable domain comprises: a CDR1 comprising the amino acid sequence of SEQ ID NO:728; a CDR2 comprising the amino acid sequence of SEQ ID NO:729; and a CDR3 comprising the amino acid sequence of SEQ ID NO:730;
(74) wherein the heavy chain variable domain comprises a CDR1 comprising the amino acid sequence of SEQ ID NO:733; a CDR2 comprising the amino acid sequence of SEQ ID NO:734; and a CDR3 comprising the amino acid sequence of SEQ ID NO:735; and wherein the light chain variable domain comprises: a CDR1 comprising the amino acid sequence of SEQ ID NO:738; a CDR2 comprising the amino acid sequence of SEQ ID NO:739; and a CDR3 comprising the amino acid sequence of SEQ ID NO:740;
(75) wherein the heavy chain variable domain comprises a CDR1 comprising the amino acid sequence of SEQ ID NO:743; a CDR2 comprising the amino acid sequence of SEQ ID NO:744; and a CDR3 comprising the amino acid sequence of SEQ ID NO:745; and wherein the light chain variable domain comprises: a CDR1 comprising the amino acid sequence of SEQ ID NO:748; a CDR2 comprising the amino acid sequence of SEQ ID NO:749; and a CDR3 comprising the amino acid sequence of SEQ ID NO:750;
(76) wherein the heavy chain variable domain comprises a CDR1 comprising the amino acid sequence of SEQ ID NO:753; a CDR2 comprising the amino acid sequence of SEQ ID NO:754; and a CDR3 comprising the amino acid sequence of SEQ ID NO:755; and wherein the light chain variable domain comprises: a CDR1 comprising the amino acid sequence of SEQ ID NO:758; a CDR2 comprising the amino acid sequence of SEQ ID NO:759; and a CDR3 comprising the amino acid sequence of SEQ ID NO:760;
(77) wherein the heavy chain variable domain comprises a CDR1 comprising the amino acid sequence of SEQ ID NO:763; a CDR2 comprising the amino acid sequence of SEQ ID NO:764; and a CDR3 comprising the amino acid sequence of SEQ ID NO:765; and wherein the light chain variable domain comprises: a CDR1 comprising the amino acid sequence of SEQ ID NO:768; a CDR2 comprising the amino acid sequence of SEQ ID NO:769; and a CDR3 comprising the amino acid sequence of SEQ ID NO:770;
(78) wherein the heavy chain variable domain comprises a CDR1 comprising the amino acid sequence of SEQ ID NO:773; a CDR2 comprising the amino acid sequence of SEQ ID NO:774; and a CDR3 comprising the amino acid sequence of SEQ ID NO:775; and wherein the light chain variable domain comprises: a CDR1 comprising the amino acid sequence of SEQ ID NO:778; a CDR2 comprising the amino acid sequence of SEQ ID NO:779; and a CDR3 comprising the amino acid sequence of SEQ ID NO:780;
(79) wherein the heavy chain variable domain comprises a CDR1 comprising the amino acid sequence of SEQ ID NO:783; a CDR2 comprising the amino acid sequence of SEQ ID NO:784; and a CDR3 comprising the amino acid sequence of SEQ ID NO:785; and wherein the light chain variable domain comprises: a CDR1 comprising the amino acid sequence of SEQ ID NO:788; a CDR2 comprising the amino acid sequence of SEQ ID NO:789; and a CDR3 comprising the amino acid sequence of SEQ ID NO:790;
(80) wherein the heavy chain variable domain comprises a CDR1 comprising the amino acid sequence of SEQ ID NO:793; a CDR2 comprising the amino acid sequence of SEQ ID NO:794; and a CDR3 comprising the amino acid sequence of SEQ ID NO:795; and wherein the light chain variable domain comprises: a CDR1 comprising the amino acid sequence of SEQ ID NO:798; a CDR2 comprising the amino acid sequence of SEQ ID NO:799; and a CDR3 comprising the amino acid sequence of SEQ ID NO:800;
(81) wherein the heavy chain variable domain comprises a CDR1 comprising the amino acid sequence of SEQ ID NO:803; a CDR2 comprising the amino acid sequence of SEQ ID NO:804; and a CDR3 comprising the amino acid sequence of SEQ ID NO:805; and wherein the light chain variable domain comprises: a CDR1 comprising the amino acid sequence of SEQ ID NO:808; a CDR2 comprising the amino acid sequence of SEQ ID NO:809; and a CDR3 comprising the amino acid sequence of SEQ ID NO:810;
(82) wherein the heavy chain variable domain comprises a CDR1 comprising the amino acid sequence of SEQ ID NO:813; a CDR2 comprising the amino acid sequence of SEQ ID NO:814; and a CDR3 comprising the amino acid sequence of SEQ ID NO:815; and wherein the light chain variable domain comprises: a CDR1 comprising the amino acid sequence of SEQ ID NO:818; a CDR2 comprising the amino acid sequence of SEQ ID NO:819; and a CDR3 comprising the amino acid sequence of SEQ ID NO:820;
(83) wherein the heavy chain variable domain comprises a CDR1 comprising the amino acid sequence of SEQ ID NO:823; a CDR2 comprising the amino acid sequence of SEQ ID NO:824; and a CDR3 comprising the amino acid sequence of SEQ ID NO:825; and wherein the light chain variable domain comprises: a CDR1 comprising the amino acid sequence of SEQ ID NO:828; a CDR2 comprising the amino acid sequence of SEQ ID NO:829; and a CDR3 comprising the amino acid sequence of SEQ ID NO:830;
(84) wherein the heavy chain variable domain comprises a CDR1 comprising the amino acid sequence of SEQ ID NO:833; a CDR2 comprising the amino acid sequence of SEQ ID NO:834; and a CDR3 comprising the amino acid sequence of SEQ ID NO:835; and wherein the light chain variable domain comprises: a CDR1 comprising the amino acid sequence of SEQ ID NO:838; a CDR2 comprising the amino acid sequence of SEQ ID NO:839; and a CDR3 comprising the amino acid sequence of SEQ ID NO:840;
(85) wherein the heavy chain variable domain comprises a CDR1 comprising the amino acid sequence of SEQ ID NO:843; a CDR2 comprising the amino acid sequence of SEQ ID NO:844; and a CDR3 comprising the amino acid sequence of SEQ ID NO:845; and wherein the light chain variable domain comprises: a CDR1 comprising the amino acid sequence of SEQ ID NO:848; a CDR2 comprising the amino acid sequence of SEQ ID NO:849; and a CDR3 comprising the amino acid sequence of SEQ ID NO:850;
(86) wherein the heavy chain variable domain comprises a CDR1 comprising the amino acid sequence of SEQ ID NO:853; a CDR2 comprising the amino acid sequence of SEQ ID NO:854; and a CDR3 comprising the amino acid sequence of SEQ ID NO:855; and wherein the light chain variable domain comprises: a CDR1 comprising the amino acid sequence of SEQ ID NO:858; a CDR2 comprising the amino acid sequence of SEQ ID NO:859; and a CDR3 comprising the amino acid sequence of SEQ ID NO:860;
(87) wherein the heavy chain variable domain comprises a CDR1 comprising the amino acid sequence of SEQ ID NO:863; a CDR2 comprising the amino acid sequence of SEQ ID NO:864; and a CDR3 comprising the amino acid sequence of SEQ ID NO:865; and wherein the light chain variable domain comprises: a CDR1 comprising the amino acid sequence of SEQ ID NO:868; a CDR2 comprising the amino acid sequence of SEQ ID NO:869; and a CDR3 comprising the amino acid sequence of SEQ ID NO:870;
(88) wherein the heavy chain variable domain comprises a CDR1 comprising the amino acid sequence of SEQ ID NO:873; a CDR2 comprising the amino acid sequence of SEQ ID NO:874; and a CDR3 comprising the amino acid sequence of SEQ ID NO:875; and wherein the light chain variable domain comprises: a CDR1 comprising the amino acid sequence of SEQ ID NO:878; a CDR2 comprising the amino acid sequence of SEQ ID NO:879; and a CDR3 comprising the amino acid sequence of SEQ ID NO:880;
(89) wherein the heavy chain variable domain comprises a CDR1 comprising the amino acid sequence of SEQ ID NO:883; a CDR2 comprising the amino acid sequence of SEQ ID NO:884; and a CDR3 comprising the amino acid sequence of SEQ ID NO:885; and wherein the light chain variable domain comprises: a CDR1 comprising the amino acid sequence of SEQ ID NO:888; a CDR2 comprising the amino acid sequence of SEQ ID NO:889; and a CDR3 comprising the amino acid sequence of SEQ ID NO:890;
(90) wherein the heavy chain variable domain comprises a CDR1 comprising the amino acid sequence of SEQ ID NO:893; a CDR2 comprising the amino acid sequence of SEQ ID NO:894; and a CDR3 comprising the amino acid sequence of SEQ ID NO:895; and wherein the light chain variable domain comprises: a CDR1 comprising the amino acid sequence of SEQ ID NO:898; a CDR2 comprising the amino acid sequence of SEQ ID NO:899; and a CDR3 comprising the amino acid sequence of SEQ ID NO:900;
(91) wherein the heavy chain variable domain comprises a CDR1 comprising the amino acid sequence of SEQ ID NO:903; a CDR2 comprising the amino acid sequence of SEQ ID NO:904; and a CDR3 comprising the amino acid sequence of SEQ ID NO:905; and wherein the light chain variable domain comprises: a CDR1 comprising the amino acid sequence of SEQ ID NO:908; a CDR2 comprising the amino acid sequence of SEQ ID NO:909; and a CDR3 comprising the amino acid sequence of SEQ ID NO:910;
(92) wherein the heavy chain variable domain comprises a CDR1 comprising the amino acid sequence of SEQ ID NO:913; a CDR2 comprising the amino acid sequence of SEQ ID NO:914; and a CDR3 comprising the amino acid sequence of SEQ ID NO:915; and wherein the light chain variable domain comprises: a CDR1 comprising the amino acid sequence of SEQ ID NO:918; a CDR2 comprising the amino acid sequence of SEQ ID NO:919; and a CDR3 comprising the amino acid sequence of SEQ ID NO:920;
(93) wherein the heavy chain variable domain comprises a CDR1 comprising the amino acid sequence of SEQ ID NO:923; a CDR2 comprising the amino acid sequence of SEQ ID NO:924; and a CDR3 comprising the amino acid sequence of SEQ ID NO:925; and wherein the light chain variable domain comprises: a CDR1 comprising the amino acid sequence of SEQ ID NO:928; a CDR2 comprising the amino acid sequence of SEQ ID NO:929; and a CDR3 comprising the amino acid sequence of SEQ ID NO:930;
(94) wherein the heavy chain variable domain comprises a CDR1 comprising the amino acid sequence of SEQ ID NO:933; a CDR2 comprising the amino acid sequence of SEQ ID NO:934; and a CDR3 comprising the amino acid sequence of SEQ ID NO:935; and wherein the light chain variable domain comprises: a CDR1 comprising the amino acid sequence of SEQ ID NO:938; a CDR2 comprising the amino acid sequence of SEQ ID NO:939; and a CDR3 comprising the amino acid sequence of SEQ ID NO:940;
(95) wherein the heavy chain variable domain comprises a CDR1 comprising the amino acid sequence of SEQ ID NO:943; a CDR2 comprising the amino acid sequence of SEQ ID NO:944; and a CDR3 comprising the amino acid sequence of SEQ ID NO:945; and wherein the light chain variable domain comprises: a CDR1 comprising the amino acid sequence of SEQ ID NO:948; a CDR2 comprising the amino acid sequence of SEQ ID NO:949; and a CDR3 comprising the amino acid sequence of SEQ ID NO:950;
(96) wherein the heavy chain variable domain comprises a CDR1 comprising the amino acid sequence of SEQ ID NO:953; a CDR2 comprising the amino acid sequence of SEQ ID NO:954; and a CDR3 comprising the amino acid sequence of SEQ ID NO:955; and wherein the light chain variable domain comprises: a CDR1 comprising the amino acid sequence of SEQ ID NO:958; a CDR2 comprising the amino acid sequence of SEQ ID NO:959; and a CDR3 comprising the amino acid sequence of SEQ ID NO:960;
(97) wherein the heavy chain variable domain comprises a CDR1 comprising the amino acid sequence of SEQ ID NO:963; a CDR2 comprising the amino acid sequence of SEQ ID NO:964; and a CDR3 comprising the amino acid sequence of SEQ ID NO:965; and wherein the light chain variable domain comprises: a CDR1 comprising the amino acid sequence of SEQ ID NO:968; a CDR2 comprising the amino acid sequence of SEQ ID NO:969; and a CDR3 comprising the amino acid sequence of SEQ ID NO:970;
(98) wherein the heavy chain variable domain comprises a CDR1 comprising the amino acid sequence of SEQ ID NO:973; a CDR2 comprising the amino acid sequence of SEQ ID NO:974; and a CDR3 comprising the amino acid sequence of SEQ ID NO:975; and wherein the light chain variable domain comprises: a CDR1 comprising the amino acid sequence of SEQ ID NO:978; a CDR2 comprising the amino acid sequence of SEQ ID NO:979; and a CDR3 comprising the amino acid sequence of SEQ ID NO:980;
(99) wherein the heavy chain variable domain comprises a CDR1 comprising the amino acid sequence of SEQ ID NO:983; a CDR2 comprising the amino acid sequence of SEQ ID NO:984; and a CDR3 comprising the amino acid sequence of SEQ ID NO:985; and wherein the light chain variable domain comprises: a CDR1 comprising the amino acid sequence of SEQ ID NO:988; a CDR2 comprising the amino acid sequence of SEQ ID NO:989; and a CDR3 comprising the amino acid sequence of SEQ ID NO:990;
(100) wherein the heavy chain variable domain comprises a complementarity determining region 1 (CDR1) comprising the amino acid sequence of SEQ ID NO:1109, a CDR2 comprising the amino acid sequence of SEQ ID NO:1139, and a CDR3 comprising the amino acid sequence of SEQ ID NO:1169; and wherein the light chain variable domain comprises a CDR1 comprising the amino acid sequence of SEQ ID NO:1199, a CDR2 comprising the amino acid sequence AAS, and a CDR3 comprising the amino acid sequence of SEQ ID NO:1229;
(101) wherein the heavy chain variable domain comprises a CDR1 comprising the amino acid sequence of SEQ ID NO:1110, a CDR2 comprising the amino acid sequence of SEQ ID NO: 1140, and a CDR3 comprising the amino acid sequence of SEQ ID NO: 1170; wherein the light chain variable domain comprises a CDR1 comprising the amino acid sequence of SEQ ID NO: 1200, a CDR2 comprising the amino acid sequence KIS, and a CDR3 comprising the amino acid sequence of SEQ ID NO: 1230;
(102) wherein the heavy chain variable domain comprises a CDR1 comprising the amino acid sequence of SEQ ID NO:1111, a CDR2 comprising the amino acid sequence of SEQ ID NO: 1141, and a CDR3 comprising the amino acid sequence of SEQ ID NO: 1171; wherein the light chain variable domain comprises a CDR1 comprising the amino acid sequence of SEQ ID NO: 1201, a CDR2 comprising the amino acid sequence EVT, and a CDR3 comprising the amino acid sequence of SEQ ID NO: 1231;
(103) wherein the heavy chain variable domain comprises a CDR1 comprising the amino acid sequence of SEQ ID NO:1112, a CDR2 comprising the amino acid sequence of SEQ ID NO: 1142, and a CDR3 comprising the amino acid sequence of SEQ ID NO: 1172; wherein the light chain variable domain comprises a CDR1 comprising the amino acid sequence of SEQ ID NO: 1202, a CDR2 comprising the amino acid sequence EVS, and a CDR3 comprising the amino acid sequence of SEQ ID NO: 1232;
(104) wherein the heavy chain variable domain comprises a CDR1 comprising the amino acid sequence of SEQ ID NO:1113, a CDR2 comprising the amino acid sequence of SEQ ID NO: 1143, and a CDR3 comprising the amino acid sequence of SEQ ID NO: 1173; wherein the light chain variable domain comprises a CDR1 comprising the amino acid sequence of SEQ ID NO: 1203, a CDR2 comprising the amino acid sequence KIS, and a CDR3 comprising the amino acid sequence of SEQ ID NO: 1233;
(105) wherein the heavy chain variable domain comprises a CDR1 comprising the amino acid sequence of SEQ ID NO:1114, a CDR2 comprising the amino acid sequence of SEQ ID NO: 1144, and a CDR3 comprising the amino acid sequence of SEQ ID NO: 1174; wherein the light chain variable domain comprises a CDR1 comprising the amino acid sequence of SEQ ID NO: 1204, a CDR2 comprising the amino acid sequence ANS, and a CDR3 comprising the amino acid sequence of SEQ ID NO: 1234;
(106) wherein the heavy chain variable domain comprises a CDR1 comprising the amino acid sequence of SEQ ID NO:1115, a CDR2 comprising the amino acid sequence of SEQ ID NO: 1145, and a CDR3 comprising the amino acid sequence of SEQ ID NO: 1175; wherein the light chain variable domain comprises a CDR1 comprising the amino acid sequence of SEQ ID NO: 1205, a CDR2 comprising the amino acid sequence KDT, and a CDR3 comprising the amino acid sequence of SEQ ID NO: 1235;
(107) wherein the heavy chain variable domain comprises a CDR1 comprising the amino acid sequence of SEQ ID NO:1116, a CDR2 comprising the amino acid sequence of SEQ ID NO: 1146, and a CDR3 comprising the amino acid sequence of SEQ ID NO: 1176; wherein the light chain variable domain comprises a CDR1 comprising the amino acid sequence of SEQ ID NO: 1206, a CDR2 comprising the amino acid sequence EVS, and a CDR3 comprising the amino acid sequence of SEQ ID NO: 1236;
(108) wherein the heavy chain variable domain comprises a CDR1 comprising the amino acid sequence of SEQ ID NO:1117, a CDR2 comprising the amino acid sequence of SEQ ID NO: 1147, and a CDR3 comprising the amino acid sequence of SEQ ID NO: 1177; wherein the light chain variable domain comprises a CDR1 comprising the amino acid sequence of SEQ ID NO: 1207, a CDR2 comprising the amino acid sequence EVN, and a CDR3 comprising the amino acid sequence of SEQ ID NO: 1237;
(109) wherein the heavy chain variable domain comprises a CDR1 comprising the amino acid sequence of SEQ ID NO:1118, a CDR2 comprising the amino acid sequence of SEQ ID NO: 1148, and a CDR3 comprising the amino acid sequence of SEQ ID NO: 1178; wherein the light chain variable domain comprises a CDR1 comprising the amino acid sequence of SEQ ID NO: 1208, a CDR2 comprising the amino acid sequence AAS, and a CDR3 comprising the amino acid sequence of SEQ ID NO: 1238;
(110) wherein the heavy chain variable domain comprises a CDR1 comprising the amino acid sequence of SEQ ID NO:1119, a CDR2 comprising the amino acid sequence of SEQ ID NO: 1149, and a CDR3 comprising the amino acid sequence of SEQ ID NO: 1179; wherein the light chain variable domain comprises a CDR1 comprising the amino acid sequence of SEQ ID NO: 1209, a CDR2 comprising the amino acid sequence QDT, and a CDR3 comprising the amino acid sequence of SEQ ID NO: 1239;
(111) wherein the heavy chain variable domain comprises a CDR1 comprising the amino acid sequence of SEQ ID NO:1120, a CDR2 comprising the amino acid sequence of SEQ ID NO: 1150, and a CDR3 comprising the amino acid sequence of SEQ ID NO: 1180 and wherein the light chain variable domain comprises: a CDR1 comprising the amino acid sequence of SEQ ID NO: 1210, a CDR2 comprising the amino acid sequence EAS, and a CDR3 comprising the amino acid sequence of SEQ ID NO: 1240;
(112) wherein the heavy chain variable domain comprises a CDR1 comprising the amino acid sequence of SEQ ID NO:1121, a CDR2 comprising the amino acid sequence of SEQ ID NO: 1151, and a CDR3 comprising the amino acid sequence of SEQ ID NO: 1181 and wherein the light chain variable domain comprises: a CDR1 comprising the amino acid sequence of SEQ ID NO: 1211, a CDR2 comprising the amino acid sequence KAS, and a CDR3 comprising the amino acid sequence of SEQ ID NO: 1241;
(113) wherein the heavy chain variable domain comprises a CDR1 comprising the amino acid sequence of SEQ ID NO:1122, a CDR2 comprising the amino acid sequence of SEQ ID NO: 1152, and a CDR3 comprising the amino acid sequence of SEQ ID NO: 1182 and wherein the light chain variable domain comprises: a CDR1 comprising the amino acid sequence of SEQ ID NO: 1212, a CDR2 comprising the amino acid sequence LKN, and a CDR3 comprising the amino acid sequence of SEQ ID NO: 1242;
(114) wherein the heavy chain variable domain comprises a CDR1 comprising the amino acid sequence of SEQ ID NO:1123, a CDR2 comprising the amino acid sequence of SEQ ID NO: 1153, and a CDR3 comprising the amino acid sequence of SEQ ID NO: 1183 and wherein the light chain variable domain comprises: a CDR1 comprising the amino acid sequence of SEQ ID NO: 1213, a CDR2 comprising the amino acid sequence GAS, and a CDR3 comprising the amino acid sequence of SEQ ID NO: 1243;
(115) wherein the heavy chain variable domain comprises a CDR1 comprising the amino acid sequence of SEQ ID NO:1124, a CDR2 comprising the amino acid sequence of SEQ ID NO: 1154, and a CDR3 comprising the amino acid sequence of SEQ ID NO: 1184 and wherein the light chain variable domain comprises: a CDR1 comprising the amino acid sequence of SEQ ID NO: 1214, a CDR2 comprising the amino acid sequence DAS, and a CDR3 comprising the amino acid sequence of SEQ ID NO: 1244;
(116) wherein the heavy chain variable domain comprises a CDR1 comprising the amino acid sequence of SEQ ID NO:1125, a CDR2 comprising the amino acid sequence of SEQ ID NO: 1155, and a CDR3 comprising the amino acid sequence of SEQ ID NO: 1185 and wherein the light chain variable domain comprises: a CDR1 comprising the amino acid sequence of SEQ ID NO: 1215, a CDR2 comprising the amino acid sequence AAS, and a CDR3 comprising the amino acid sequence of SEQ ID NO: 1245;
(117) wherein the heavy chain variable domain comprises a CDR1 comprising the amino acid sequence of SEQ ID NO:1126, a CDR2 comprising the amino acid sequence of SEQ ID NO: 1156, and a CDR3 comprising the amino acid sequence of SEQ ID NO: 1186 and wherein the light chain variable domain comprises: a CDR1 comprising the amino acid sequence of SEQ ID NO: 1216, a CDR2 comprising the amino acid sequence DAS, and a CDR3 comprising the amino acid sequence of SEQ ID NO: 1246;
(118) wherein the heavy chain variable domain comprises a CDR1 comprising the amino acid sequence of SEQ ID NO:1127, a CDR2 comprising the amino acid sequence of SEQ ID NO: 1157, and a CDR3 comprising the amino acid sequence of SEQ ID NO: 1187 and wherein the light chain variable domain comprises: a CDR1 comprising the amino acid sequence of SEQ ID NO: 1217, a CDR2 comprising the amino acid sequence DVS, and a CDR3 comprising the amino acid sequence of SEQ ID NO: 1247;
(119) wherein the heavy chain variable domain comprises a CDR1 comprising the amino acid sequence of SEQ ID NO:1128, a CDR2 comprising the amino acid sequence of SEQ ID NO: 1158, and a CDR3 comprising the amino acid sequence of SEQ ID NO: 1188 and wherein the light chain variable domain comprises: a CDR1 comprising the amino acid sequence of SEQ ID NO: 1218, a CDR2 comprising the amino acid sequence GNN, and a CDR3 comprising the amino acid sequence of SEQ ID NO: 1248;
(120) wherein the heavy chain variable domain comprises a CDR1 comprising the amino acid sequence of SEQ ID NO:1129, a CDR2 comprising the amino acid sequence of SEQ ID NO: 1159, and a CDR3 comprising the amino acid sequence of SEQ ID NO: 1189 and wherein the light chain variable domain comprises: a CDR1 comprising the amino acid sequence of SEQ ID NO: 1219, a CDR2 comprising the amino acid sequence AAS, and a CDR3 comprising the amino acid sequence of SEQ ID NO: 1249;
(121) wherein the heavy chain variable domain comprises a CDR1 comprising the amino acid sequence of SEQ ID NO:1130, a CDR2 comprising the amino acid sequence of SEQ ID NO: 1160, and a CDR3 comprising the amino acid sequence of SEQ ID NO: 1190 and wherein the light chain variable domain comprises: a CDR1 comprising the amino acid sequence of SEQ ID NO: 1220, a CDR2 comprising the amino acid sequence NAS, and a CDR3 comprising the amino acid sequence of SEQ ID NO: 1250;
(122) wherein the heavy chain variable domain comprises a CDR1 comprising the amino acid sequence of SEQ ID NO:1131, a CDR2 comprising the amino acid sequence of SEQ ID NO: 1161, and a CDR3 comprising the amino acid sequence of SEQ ID NO: 1191 and wherein the light chain variable domain comprises: a CDR1 comprising the amino acid sequence of SEQ ID NO: 1221, a CDR2 comprising the amino acid sequence AAS, and a CDR3 comprising the amino acid sequence of SEQ ID NO: 1251;
(123) wherein the heavy chain variable domain comprises a CDR1 comprising the amino acid sequence of SEQ ID NO:1132, a CDR2 comprising the amino acid sequence of SEQ ID NO: 1162, and a CDR3 comprising the amino acid sequence of SEQ ID NO: 1192 and wherein the light chain variable domain comprises: a CDR1 comprising the amino acid sequence of SEQ ID NO: 1222, a CDR2 comprising the amino acid sequence AAS, and a CDR3 comprising the amino acid sequence of SEQ ID NO: 1252;
(124) wherein the heavy chain variable domain comprises a CDR1 comprising the amino acid sequence of SEQ ID NO:1133, a CDR2 comprising the amino acid sequence of SEQ ID NO: 1163, and a CDR3 comprising the amino acid sequence of SEQ ID NO: 1193 and wherein the light chain variable domain comprises: a CDR1 comprising the amino acid sequence of SEQ ID NO: 1223, a CDR2 comprising the amino acid sequence KVS, and a CDR3 comprising the amino acid sequence of SEQ ID NO: 1253;
(125) wherein the heavy chain variable domain comprises a CDR1 comprising the amino acid sequence of SEQ ID NO:1134, a CDR2 comprising the amino acid sequence of SEQ ID NO: 1164, and a CDR3 comprising the amino acid sequence of SEQ ID NO: 1194 and wherein the light chain variable domain comprises: a CDR1 comprising the amino acid sequence of SEQ ID NO: 1224, a CDR2 comprising the amino acid sequence AAS, and a CDR3 comprising the amino acid sequence of SEQ ID NO: 1254;
(126) wherein the heavy chain variable domain comprises a CDR1 comprising the amino acid sequence of SEQ ID NO:1135, a CDR2 comprising the amino acid sequence of SEQ ID NO: 1165, and a CDR3 comprising the amino acid sequence of SEQ ID NO: 1195 and wherein the light chain variable domain comprises: a CDR1 comprising the amino acid sequence of SEQ ID NO: 1225, a CDR2 comprising the amino acid sequence QDS, and a CDR3 comprising the amino acid sequence of SEQ ID NO: 1255;
(127) wherein the heavy chain variable domain comprises a CDR1 comprising the amino acid sequence of SEQ ID NO:1136, a CDR2 comprising the amino acid sequence of SEQ ID NO: 1166, and a CDR3 comprising the amino acid sequence of SEQ ID NO: 1196 and wherein the light chain variable domain comprises: a CDR1 comprising the amino acid sequence of SEQ ID NO: 1226, a CDR2 comprising the amino acid sequence AAS, and a CDR3 comprising the amino acid sequence of SEQ ID NO: 1256;
(128) wherein the heavy chain variable domain comprises a CDR1 comprising the amino acid sequence of SEQ ID NO:1137, a CDR2 comprising the amino acid sequence of SEQ ID NO: 1167, and a CDR3 comprising the amino acid sequence of SEQ ID NO: 1197 and wherein the light chain variable domain comprises: a CDR1 comprising the amino acid sequence of SEQ ID NO: 1227, a CDR2 comprising the amino acid sequence TTS, and a CDR3 comprising the amino acid sequence of SEQ ID NO: 1257;
(129) wherein the heavy chain variable domain comprises a CDR1 comprising the amino acid sequence of SEQ ID NO:1138, a CDR2 comprising the amino acid sequence of SEQ ID NO: 1168, and a CDR3 comprising the amino acid sequence of SEQ ID NO: 1198 and wherein the light chain variable domain comprises: a CDR1 comprising the amino acid sequence of SEQ ID NO: 1228, a CDR2 comprising the amino acid sequence EDN, and a CDR3 comprising the amino acid sequence of SEQ ID NO: 1258.

2. The isolated recombinant monoclonal antibody, or antigen-binding fragment thereof, of claim 1, wherein said antibody comprises a heavy chain variable domain and a light chain variable domain, and:
(1) wherein the heavy chain variable domain comprises the amino acid sequence of SEQ ID NO:2 and the light chain variable domain comprises the amino acid sequence of SEQ ID NO:7;
(2) wherein the heavy chain variable domain comprises the amino acid sequence of SEQ ID NO:12 and the light chain variable domain comprises the amino acid sequence of SEQ ID NO:17;
(3) wherein the heavy chain variable domain comprises the amino acid sequence of SEQ ID NO:22 and the light chain variable domain comprises the amino acid sequence of SEQ ID NO:27;
(4) wherein the heavy chain variable domain comprises the amino acid sequence of SEQ ID NO:32 and the light chain variable domain comprises the amino acid sequence of SEQ ID NO:37;
(5) wherein the heavy chain variable domain comprises the amino acid sequence of SEQ ID NO:42 and the light chain variable domain comprises the amino acid sequence of SEQ ID NO:47;
(6) wherein the heavy chain variable domain comprises the amino acid sequence of SEQ ID NO:52 and the light chain variable domain comprises the amino acid sequence of SEQ ID NO:57;
(7) wherein the heavy chain variable domain comprises the amino acid sequence of SEQ ID NO:62 and the light chain variable domain comprises the amino acid sequence of SEQ ID NO:67;
(8) wherein the heavy chain variable domain comprises the amino acid sequence of SEQ ID NO:72 and the light chain variable domain comprises the amino acid sequence of SEQ ID NO:77;
(9) wherein the heavy chain variable domain comprises the amino acid sequence of SEQ ID NO:82 and the light chain variable domain comprises the amino acid sequence of SEQ ID NO:87;
(10) wherein the heavy chain variable domain comprises the amino acid sequence of SEQ ID NO:92 and the light chain variable domain comprises the amino acid sequence of SEQ ID NO:97;
(11) wherein the heavy chain variable domain comprises the amino acid sequence of SEQ ID NO:102 and the light chain variable domain comprises the amino acid sequence of SEQ ID NO:107;
(12) wherein the heavy chain variable domain comprises the amino acid sequence of SEQ ID NO:112 and the light chain variable domain comprises the amino acid sequence of SEQ ID NO:117;
(13) wherein the heavy chain variable domain comprises the amino acid sequence of SEQ ID NO:122 and the light chain variable domain comprises the amino acid sequence of SEQ ID NO:127;
(14) wherein the heavy chain variable domain comprises the amino acid sequence of SEQ ID NO:132 and the light chain variable domain comprises the amino acid sequence of SEQ ID NO:137;
(15) wherein the heavy chain variable domain comprises the amino acid sequence of SEQ ID NO:142 and the light chain variable domain comprises the amino acid sequence of SEQ ID NO:147;
(16) wherein the heavy chain variable domain comprises the amino acid sequence of SEQ ID NO:152 and the light chain variable domain comprises the amino acid sequence of SEQ ID NO:157;
(17) wherein the heavy chain variable domain comprises the amino acid sequence of SEQ ID NO:162 and the light chain variable domain comprises the amino acid sequence of SEQ ID NO:167;
(18) wherein the heavy chain variable domain comprises the amino acid sequence of SEQ ID NO:172 and the light chain variable domain comprises the amino acid sequence of SEQ ID NO:177;
(19) wherein the heavy chain variable domain comprises the amino acid sequence of SEQ ID NO:182 and the light chain variable domain comprises the amino acid sequence of SEQ ID NO:187;
(20) wherein the heavy chain variable domain comprises the amino acid sequence of SEQ ID NO:192 and the light chain variable domain comprises the amino acid sequence of SEQ ID NO:197;
(21) wherein the heavy chain variable domain comprises the amino acid sequence of SEQ ID NO:202 and the light chain variable domain comprises the amino acid sequence of SEQ ID NO:207;
(22) wherein the heavy chain variable domain comprises the amino acid sequence of SEQ ID NO:212 and the light chain variable domain comprises the amino acid sequence of SEQ ID NO:217;
(23) wherein the heavy chain variable domain comprises the amino acid sequence of SEQ ID NO:222 and the light chain variable domain comprises the amino acid sequence of SEQ ID NO:227;
(24) wherein the heavy chain variable domain comprises the amino acid sequence of SEQ ID NO:232 and the light chain variable domain comprises the amino acid sequence of SEQ ID NO:237;
(25) wherein the heavy chain variable domain comprises the amino acid sequence of SEQ ID NO:242 and the light chain variable domain comprises the amino acid sequence of SEQ ID NO:247;
(26) wherein the heavy chain variable domain comprises the amino acid sequence of SEQ ID NO:252 and the light chain variable domain comprises the amino acid sequence of SEQ ID NO:257;
(27) wherein the heavy chain variable domain comprises the amino acid sequence of SEQ ID NO:262 and the light chain variable domain comprises the amino acid sequence of SEQ ID NO:267;
(28) wherein the heavy chain variable domain comprises the amino acid sequence of SEQ ID NO:272 and the light chain variable domain comprises the amino acid sequence of SEQ ID NO:277;
(29) wherein the heavy chain variable domain comprises the amino acid sequence of SEQ ID NO:282 and the light chain variable domain comprises the amino acid sequence of SEQ ID NO:287;
(30) wherein the heavy chain variable domain comprises the amino acid sequence of SEQ ID NO:292 and the light chain variable domain comprises the amino acid sequence of SEQ ID NO:297;
(31) wherein the heavy chain variable domain comprises the amino acid sequence of SEQ ID NO:302 and the light chain variable domain comprises the amino acid sequence of SEQ ID NO:307;
(32) wherein the heavy chain variable domain comprises the amino acid sequence of SEQ ID NO:312 and the light chain variable domain comprises the amino acid sequence of SEQ ID NO:317;
(33) wherein the heavy chain variable domain comprises the amino acid sequence of SEQ ID NO:322 and the light chain variable domain comprises the amino acid sequence of SEQ ID NO:327;
(34) wherein the heavy chain variable domain comprises the amino acid sequence of SEQ ID NO:332 and the light chain variable domain comprises the amino acid sequence of SEQ ID NO:337;
(35) wherein the heavy chain variable domain comprises the amino acid sequence of SEQ ID NO:342 and the light chain variable domain comprises the amino acid sequence of SEQ ID NO:347;
(36) wherein the heavy chain variable domain comprises the amino acid sequence of SEQ ID NO:352 and the light chain variable domain comprises the amino acid sequence of SEQ ID NO:357;
(37) wherein the heavy chain variable domain comprises the amino acid sequence of SEQ ID NO:362 and the light chain variable domain comprises the amino acid sequence of SEQ ID NO:367;
(38) wherein the heavy chain variable domain comprises the amino acid sequence of SEQ ID NO:372 and the light chain variable domain comprises the amino acid sequence of SEQ ID NO:377;
(39) wherein the heavy chain variable domain comprises the amino acid sequence of SEQ ID NO:382 and the light chain variable domain comprises the amino acid sequence of SEQ ID NO:387;
(40) wherein the heavy chain variable domain comprises the amino acid sequence of SEQ ID NO:392 and the light chain variable domain comprises the amino acid sequence of SEQ ID NO:397;
(41) wherein the heavy chain variable domain comprises the amino acid sequence of SEQ ID NO:402 and the light chain variable domain comprises the amino acid sequence of SEQ ID NO:497;
(42) wherein the heavy chain variable domain comprises the amino acid sequence of SEQ ID NO:412 and the light chain variable domain comprises the amino acid sequence of SEQ ID NO:417; or
(43) wherein the heavy chain variable domain comprises the amino acid sequence of SEQ ID NO:422 and the light chain variable domain comprises the amino acid sequence of SEQ ID NO:427
(44) wherein the heavy chain variable domain comprises the amino acid sequence of SEQ ID NO:432 and the light chain variable domain comprises the amino acid sequence of SEQ ID NO:437;
(45) wherein the heavy chain variable domain comprises the amino acid sequence of SEQ ID NO:442 and the light chain variable domain comprises the amino acid sequence of SEQ ID NO:447;
(46) wherein the heavy chain variable domain comprises the amino acid sequence of SEQ ID NO:452 and the light chain variable domain comprises the amino acid sequence of SEQ ID NO:457;
(47) wherein the heavy chain variable domain comprises the amino acid sequence of SEQ ID NO:462 and the light chain variable domain comprises the amino acid sequence of SEQ ID NO:467;
(48) wherein the heavy chain variable domain comprises the amino acid sequence of SEQ ID NO:472 and the light chain variable domain comprises the amino acid sequence of SEQ ID NO:477;
(49) wherein the heavy chain variable domain comprises the amino acid sequence of SEQ ID NO:482 and the light chain variable domain comprises the amino acid sequence of SEQ ID NO:487;
(50) wherein the heavy chain variable domain comprises the amino acid sequence of SEQ ID NO:492 and the light chain variable domain comprises the amino acid sequence of SEQ ID NO:497;
(51) wherein the heavy chain variable domain comprises the amino acid sequence of SEQ ID NO:502 and the light chain variable domain comprises the amino acid sequence of SEQ ID NO:507;
(52) wherein the heavy chain variable domain comprises the amino acid sequence of SEQ ID NO:512 and the light chain variable domain comprises the amino acid sequence of SEQ ID NO:517;
(53) wherein the heavy chain variable domain comprises the amino acid sequence of SEQ ID NO:522 and the light chain variable domain comprises the amino acid sequence of SEQ ID NO:527;
(54) wherein the heavy chain variable domain comprises the amino acid sequence of SEQ ID NO:532 and the light chain variable domain comprises the amino acid sequence of SEQ ID NO:537;
(55) wherein the heavy chain variable domain comprises the amino acid sequence of SEQ ID NO:542 and the light chain variable domain comprises the amino acid sequence of SEQ ID NO:547;
(56) wherein the heavy chain variable domain comprises the amino acid sequence of SEQ ID NO:552 and the light chain variable domain comprises the amino acid sequence of SEQ ID NO:557;
(57) wherein the heavy chain variable domain comprises the amino acid sequence of SEQ ID NO:562 and the light chain variable domain comprises the amino acid sequence of SEQ ID NO:567;
(58) wherein the heavy chain variable domain comprises the amino acid sequence of SEQ ID NO:572 and the light chain variable domain comprises the amino acid sequence of SEQ ID NO:577;
(59) wherein the heavy chain variable domain comprises the amino acid sequence of SEQ ID NO:582 and the light chain variable domain comprises the amino acid sequence of SEQ ID NO:587;
(60) wherein the heavy chain variable domain comprises the amino acid sequence of SEQ ID NO:592 and the light chain variable domain comprises the amino acid sequence of SEQ ID NO:597;
(61) wherein the heavy chain variable domain comprises the amino acid sequence of SEQ ID NO:602 and the light chain variable domain comprises the amino acid sequence of SEQ ID NO:607;
(62) wherein the heavy chain variable domain comprises the amino acid sequence of SEQ ID NO:612 and the light chain variable domain comprises the amino acid sequence of SEQ ID NO:617;
(63) wherein the heavy chain variable domain comprises the amino acid sequence of SEQ ID NO:622 and the light chain variable domain comprises the amino acid sequence of SEQ ID NO:627;
(64) wherein the heavy chain variable domain comprises the amino acid sequence of SEQ ID NO:632 and the light chain variable domain comprises the amino acid sequence of SEQ ID NO:637;
(65) wherein the heavy chain variable domain comprises the amino acid sequence of SEQ ID NO:642 and the light chain variable domain comprises the amino acid sequence of SEQ ID NO:647;
(66) wherein the heavy chain variable domain comprises the amino acid sequence of SEQ ID NO:652 and the light chain variable domain comprises the amino acid sequence of SEQ ID NO:657;
(67) wherein the heavy chain variable domain comprises the amino acid sequence of SEQ ID NO:662 and the light chain variable domain comprises the amino acid sequence of SEQ ID NO:667;
(68) wherein the heavy chain variable domain comprises the amino acid sequence of SEQ ID NO:672 and the light chain variable domain comprises the amino acid sequence of SEQ ID NO:677;
(69) wherein the heavy chain variable domain comprises the amino acid sequence of SEQ ID NO:682 and the light chain variable domain comprises the amino acid sequence of SEQ ID NO:687;
(70) wherein the heavy chain variable domain comprises the amino acid sequence of SEQ ID NO:692 and the light chain variable domain comprises the amino acid sequence of SEQ ID NO:697;
(71) wherein the heavy chain variable domain comprises the amino acid sequence of SEQ ID NO:702 and the light chain variable domain comprises the amino acid sequence of SEQ ID NO:707;
(72) wherein the heavy chain variable domain comprises the amino acid sequence of SEQ ID NO:712 and the light chain variable domain comprises the amino acid sequence of SEQ ID NO:717;
(73) wherein the heavy chain variable domain comprises the amino acid sequence of SEQ ID NO:722 and the light chain variable domain comprises the amino acid sequence of SEQ ID NO:727;
(74) wherein the heavy chain variable domain comprises the amino acid sequence of SEQ ID NO:732 and the light chain variable domain comprises the amino acid sequence of SEQ ID NO:737;
(75) wherein the heavy chain variable domain comprises the amino acid sequence of SEQ ID NO:742 and the light chain variable domain comprises the amino acid sequence of SEQ ID NO:747;
(76) wherein the heavy chain variable domain comprises the amino acid sequence of SEQ ID NO:752 and the light chain variable domain comprises the amino acid sequence of SEQ ID NO:757;
(77) wherein the heavy chain variable domain comprises the amino acid sequence of SEQ ID NO:762 and the light chain variable domain comprises the amino acid sequence of SEQ ID NO:767;
(78) wherein the heavy chain variable domain comprises the amino acid sequence of SEQ ID NO:772 and the light chain variable domain comprises the amino acid sequence of SEQ ID NO:777;
(79) wherein the heavy chain variable domain comprises the amino acid sequence of SEQ ID NO:782 and the light chain variable domain comprises the amino acid sequence of SEQ ID NO:787;
(80) wherein the heavy chain variable domain comprises the amino acid sequence of SEQ ID NO:792 and the light chain variable domain comprises the amino acid sequence of SEQ ID NO:797;
(81) wherein the heavy chain variable domain comprises the amino acid sequence of SEQ ID NO:802 and the light chain variable domain comprises the amino acid sequence of SEQ ID NO:807;
(82) wherein the heavy chain variable domain comprises the amino acid sequence of SEQ ID NO:812 and the light chain variable domain comprises the amino acid sequence of SEQ ID NO:817;
(83) wherein the heavy chain variable domain comprises the amino acid sequence of SEQ ID NO:822 and the light chain variable domain comprises the amino acid sequence of SEQ ID NO:827;
(84) wherein the heavy chain variable domain comprises the amino acid sequence of SEQ ID NO:832 and the light chain variable domain comprises the amino acid sequence of SEQ ID NO:837;
(85) wherein the heavy chain variable domain comprises the amino acid sequence of SEQ ID NO:842 and the light chain variable domain comprises the amino acid sequence of SEQ ID NO:847;
(86) wherein the heavy chain variable domain comprises the amino acid sequence of SEQ ID NO:852 and the light chain variable domain comprises the amino acid sequence of SEQ ID NO:857;
(87) wherein the heavy chain variable domain comprises the amino acid sequence of SEQ ID NO:862 and the light chain variable domain comprises the amino acid sequence of SEQ ID NO:867;
(88) wherein the heavy chain variable domain comprises the amino acid sequence of SEQ ID NO:872 and the light chain variable domain comprises the amino acid sequence of SEQ ID NO:877;
(89) wherein the heavy chain variable domain comprises the amino acid sequence of SEQ ID NO:882 and the light chain variable domain comprises the amino acid sequence of SEQ ID NO:887;
(90) wherein the heavy chain variable domain comprises the amino acid sequence of SEQ ID NO:892 and the light chain variable domain comprises the amino acid sequence of SEQ ID NO:897;
(91) wherein the heavy chain variable domain comprises the amino acid sequence of SEQ ID NO:902 and the light chain variable domain comprises the amino acid sequence of SEQ ID NO:907;
(92) wherein the heavy chain variable domain comprises the amino acid sequence of SEQ ID NO:912 and the light chain variable domain comprises the amino acid sequence of SEQ ID NO:917;
(93) wherein the heavy chain variable domain comprises the amino acid sequence of SEQ ID NO:922 and the light chain variable domain comprises the amino acid sequence of SEQ ID NO:927;
(94) wherein the heavy chain variable domain comprises the amino acid sequence of SEQ ID NO:932 and the light chain variable domain comprises the amino acid sequence of SEQ ID NO:937;
(95) wherein the heavy chain variable domain comprises the amino acid sequence of SEQ ID NO:942 and the light chain variable domain comprises the amino acid sequence of SEQ ID NO:947;
(96) wherein the heavy chain variable domain comprises the amino acid sequence of SEQ ID NO:952 and the light chain variable domain comprises the amino acid sequence of SEQ ID NO:957;
(97) wherein the heavy chain variable domain comprises the amino acid sequence of SEQ ID NO:962 and the light chain variable domain comprises the amino acid sequence of SEQ ID NO:967;
(98) wherein the heavy chain variable domain comprises the amino acid sequence of SEQ ID NO:972 and the light chain variable domain comprises the amino acid sequence of SEQ ID NO:977; or
(99) wherein the heavy chain variable domain comprises the amino acid sequence of SEQ ID NO:982 and the light chain variable domain comprises the amino acid sequence of SEQ ID NO:987.

3. The isolated recombinant monoclonal antibody, or antigen-binding fragment thereof, of claim 1, wherein the coronavirus is Severe Acute Respiratory Syndrome (SARS)-CoV-2.

4. The isolated recombinant monoclonal antibody, or antigen-binding fragment thereof, of claim 1, wherein
(a) the coronavirus is SARS-CoV-2 and/or SARS-CoV-1 and the antibody is selected from one or more of the antibodies defined in (2)-(4), (10), (19), (21) (23) (24), (26), (27), (29), (30) (32)-(41), (44), (46)-(48), (50), (51), (53)-(60), (62), (63), (65), (68), (70)-(73), (76)-(79), (81)-(84), (86), (92), (95), (96), and (99);
(b) the coronavirus is SARS-CoV-2 and/or MERS-CoV and the antibody is selected from one or more of the antibodies defined in (1)-(4), (7), (9)-(41), (44)-(45), (46), (50)-(59), (70), (76), (82), (92), (96), and (99);
(c) the coronavirus is SARS-CoV-2 and/or hCoV-HKU1 and the antibody is selected from one or more of the antibodies defined in (10)-(4), (9), (10), (14), (19), (23), (27)-(29) (32)-(41), (44), (46), (48), (50)-(59), (70), (76), (79), (82), (92), (96), and (99);
(d) the coronavirus is SARS-CoV-2 and/or hCoV-OC43 and the antibody is selected from one or more of the antibodies defined in (2)-(4), (6), (19), (23) (32)-(41), (44), (46), (48), (50)-(60), (63), (70), (76), (79), (81), (82), (92), (96), (97), and (99);
(e) the coronavirus is SARS-CoV-2 and/or hCoV-NL63 and the antibody is selected from one or more of the antibodies defined in (2)-(4), (10), (19), (23), (27)-(29) (32)-(41), (44), (46), (48), (50)-(60), (63), (70), (76), (81), (82), (92), (96), (97), and (99); and/or
(f) the coronavirus is SARS-CoV-2 and/or hCoV-229E and the antibody is selected from one or more of the antibodies defined in (2)-(4), (10), (19), (23), (24), (27)-(29) (32)-(41), (44), (50)-(59), (70), (76), (82), (92), (96), and (99).

5. (canceled)

6. The isolated recombinant monoclonal antibody, or antigen-binding fragment thereof, of claim 1, wherein the antibody binds to at least one of an N terminal domain (NTD) and/or a receptor binding domain (RBD) of a coronavirus spike protein.

7. The isolated recombinant monoclonal antibody, or antigen-binding fragment thereof, of claim 1, wherein the antibody binds to an S1 or S2 subunit of a coronavirus spike protein.

8. The isolated recombinant monoclonal antibody, or antigen-binding fragment thereof, of claim 1, wherein the antibody binds to a coronavirus with a dissociation constant (K_{D}) equal to or less than 50 μM (10⁻¹¹M), as measured by BioLayer Interferometry.

9. (canceled)

10. The isolated recombinant monoclonal antibody, or antigen-binding fragment thereof, of claim 1, wherein the antibody is a human antibody.

11. The isolated recombinant monoclonal antibody, or antigen-binding fragment thereof, of claim 1, wherein the antibody is an IgG or IgM antibody.

12. The isolated recombinant monoclonal antibody, or antigen-binding fragment thereof, of claim 1, wherein the antibody is expressed from a transgenic animal or is expressed in vitro from an insect cell or a mammalian cell, such as a Chinese Hamster Ovary cell or a Human Embryonic Kidney 293T cell.

13. (canceled)

14. (canceled)

15. The isolated recombinant monoclonal antibody, or antigen-binding fragment thereof, of claim 1, further comprising a human constant region, wherein a source of the heavy chain variable domain and the light chain variable domain is different from a source of the human constant region.

16. (canceled)

17. A bispecific antibody comprising a first antigen-binding fragment of a first recombinant monoclonal antibody of claim 1, wherein:
(a) the first recombinant monoclonal antibody binds to a receptor-binding domain of the S1 subunit of SARS-CoV2 and the second recombinant monoclonal antibody binds to the N-terminal domain of the S1 subunit of SARS-CoV2;
(b) the first recombinant monoclonal antibody binds to a receptor-binding domain of the S1 subunit of SARS-CoV2 and the second recombinant monoclonal antibody binds to an S2 subunit of SARS-CoV2;
(c) the first recombinant monoclonal antibody binds to the N-terminal domain of the S1 subunit of SARS-CoV2 and the second recombinant monoclonal antibody binds to an S2 subunit of SARS-CoV2;
(d) the first recombinant monoclonal antibody binds to a receptor-binding domain of the S1 subunit of SARS-CoV2 and the second recombinant monoclonal antibody binds to the receptor-binding domain of the S1 subunit of SARS-CoV2, wherein the first and second recombinant monoclonal antibodies are not the same monoclonal antibody;
(e) the first recombinant monoclonal antibody binds to the N-terminal domain of the S1 subunit of SARS-CoV2 and the second recombinant monoclonal antibody binds to the N-terminal domain of the S1 subunit of SARS-CoV2, wherein the first and second recombinant monoclonal antibodies are not the same monoclonal antibody;
(f) the first recombinant monoclonal antibody binds to an S2 subunit of SARS-CoV2 and the second recombinant monoclonal antibody binds to an S2 subunit of SARS-CoV2, wherein the first and second recombinant monoclonal antibodies are not the same monoclonal antibody;
(g) the first recombinant monoclonal antibody binds to an binds to an S1 subunit of SARS-CoV2 and the second recombinant monoclonal antibody binds to an S1 subunit of SARS-CoV2, wherein the first and second recombinant monoclonal antibodies are not the same monoclonal antibody; or
(h) the first recombinant monoclonal antibody binds to an binds to an S1 subunit of SARS-CoV2 and the second recombinant monoclonal antibody binds to an S2 subunit of SARS-CoV2, wherein the first and second recombinant monoclonal antibodies are not the same monoclonal antibody.

18. A composition comprising one or more of the isolated recombinant monoclonal antibodies, or antigen-binding fragment thereof, of claim 1.

19. The composition of claim 18, comprising:
(a) at least a first recombinant monoclonal antibody, or antigen-binding fragment thereof, wherein the first recombinant monoclonal antibody, or antigen-binding fragment thereof, binds to a receptor-binding domain of the S1 subunit of SARS-CoV2 and the second recombinant monoclonal antibody, or antigen-binding fragment thereof, binds to the N-terminal domain of the S1 subunit of SARS-CoV2;
(b) at least a first recombinant monoclonal antibody, or antigen-binding fragment thereof, wherein the first recombinant monoclonal antibody, or antigen-binding fragment thereof, binds to a receptor-binding domain of the S1 subunit of SARS-CoV2 and the second recombinant monoclonal antibody, or antigen-binding fragment thereof, binds to an S2 subunit of SARS-CoV2;
(c) at least a first recombinant monoclonal antibody, or antigen-binding fragment thereof, wherein the first recombinant monoclonal antibody, or antigen-binding fragment thereof, binds to the N-terminal domain of the S1 subunit of SARS-CoV2 and the second recombinant monoclonal antibody, or antigen-binding fragment thereof, binds to an S2 subunit of SARS-CoV2;
(d) at least a first recombinant monoclonal antibody, or antigen-binding fragment thereof, wherein the first recombinant monoclonal antibody, or antigen-binding fragment thereof, binds to a receptor-binding domain of the S1 subunit of SARS-CoV2 and the second recombinant monoclonal antibody, or antigen-binding fragment thereof, binds to a receptor-binding domain of the S1 subunit of SARS-CoV2, wherein the first and second recombinant monoclonal antibodies are not the same monoclonal antibody;
(e) at least a first recombinant monoclonal antibody, or antigen-binding fragment thereof, wherein the first recombinant monoclonal antibody, or antigen-binding fragment thereof, binds to the N-terminal domain of the S1 subunit of SARS-CoV2 and the second recombinant monoclonal antibody, or antigen-binding fragment thereof, binds to the N-terminal domain of the S1 subunit of SARS-CoV2, wherein the first and second recombinant monoclonal antibodies are not the same monoclonal antibody; or
(f) at least a first recombinant monoclonal antibody, or antigen-binding fragment thereof, wherein the first recombinant monoclonal antibody, or antigen-binding fragment thereof, binds to an S2 subunit of SARS-CoV2 and the second recombinant monoclonal antibody, or antigen-binding fragment thereof, binds to an S2 subunit of SARS-CoV2, wherein the first and second recombinant monoclonal antibodies are not the same monoclonal antibody.

20. The bispecific antibody of claim 17, wherein the first recombinant monoclonal antibody, or antigen-binding fragment thereof, binds to a receptor-binding domain of the S1 subunit of SARS-CoV2 and is one of COV_2123, COV_2125, or COV_2173 and the second recombinant monoclonal antibody, or antigen-binding fragment thereof, binds to the N-terminal domain of the S1 subunit of SARS-CoV2 and is one of COV_2004, COV_2025, or COV_2039.

21. (canceled)

22. The composition of claim 18, wherein the composition comprises a therapeutically effective amount of the isolated recombinant monoclonal antibody, or antigen-binding fragment thereof or wherein the composition is formulated for subcutaneous, intravenous, intraarterial, or intramuscular injection.

23. (canceled)

24. An isolated nucleic acid that encodes the amino acid sequence of one or more of the complementarity determining regions (CDRs) of the heavy chain variable domain and/or light chain variable domain of the recombinant, monoclonal antibody, or antigen-binding fragment thereof, of claim 1.

25. An isolated nucleic acid that encodes the amino acid sequence of the heavy and/or light chain variable domain of the recombinant, monoclonal antibody, or antigen-binding fragment thereof, of claim 2, wherein
the isolated nucleic acid encodes the heavy chain variable domain of the antibody defined in (1) and the isolated nucleic acid comprises SEQ ID NO: 1 and/or the isolated nucleic acid encodes the light chain variable domain of the antibody defined in (1) and the isolated nucleic acid comprises SEQ ID NO: 6;
the isolated nucleic acid encodes the heavy chain variable domain of the antibody defined in (2) and the isolated nucleic acid comprises SEQ ID NO: 11 and/or the isolated nucleic acid encodes the light chain variable domain of the antibody defined in (2) and the isolated nucleic acid comprises SEQ ID NO: 16;
the isolated nucleic acid encodes the heavy chain variable domain of the antibody defined in (3) and the isolated nucleic acid comprises SEQ ID NO: 21 and/or the isolated nucleic acid encodes the light chain variable domain of the antibody defined in (3) and the isolated nucleic acid comprises SEQ ID NO: 26;
the isolated nucleic acid encodes the heavy chain variable domain of the antibody defined in (4) and the isolated nucleic acid comprises SEQ ID NO: 31 and/or the isolated nucleic acid encodes the light chain variable domain of the antibody defined in (4) and the isolated nucleic acid comprises SEQ ID NO: 36;
the isolated nucleic acid encodes the heavy chain variable domain of the antibody defined in (5) and the isolated nucleic acid comprises SEQ ID NO: 41 and/or the isolated nucleic acid encodes the light chain variable domain of the antibody defined in (5) and the isolated nucleic acid comprises SEQ ID NO: 46;
the isolated nucleic acid encodes the heavy chain variable domain of the antibody defined in (6) and the isolated nucleic acid comprises SEQ ID NO: 51 and/or the isolated nucleic acid encodes the light chain variable domain of the antibody defined in (6) and the isolated nucleic acid comprises SEQ ID NO: 56;
the isolated nucleic acid encodes the heavy chain variable domain of the antibody defined in (7) and the isolated nucleic acid comprises SEQ ID NO: 61 and/or the isolated nucleic acid encodes the light chain variable domain of the antibody defined in (7) and the isolated nucleic acid comprises SEQ ID NO: 66;
the isolated nucleic acid encodes the heavy chain variable domain of the antibody defined in (8) and the isolated nucleic acid comprises SEQ ID NO: 71 and/or the isolated nucleic acid encodes the light chain variable domain of the antibody defined in (8) and the isolated nucleic acid comprises SEQ ID NO: 76;
the isolated nucleic acid encodes the heavy chain variable domain of the antibody defined in (9) and the isolated nucleic acid comprises SEQ ID NO: 81 and/or the isolated nucleic acid encodes the light chain variable domain of the antibody defined in (9) and the isolated nucleic acid comprises SEQ ID NO: 86;
the isolated nucleic acid encodes the heavy chain variable domain of the antibody defined in (10) and the isolated nucleic acid comprises SEQ ID NO: 91 and/or the isolated nucleic acid encodes the light chain variable domain of the antibody defined in (10) and the isolated nucleic acid comprises SEQ ID NO: 96;
the isolated nucleic acid encodes the heavy chain variable domain of the antibody defined in (11) and the isolated nucleic acid comprises SEQ ID NO: 101 and/or the isolated nucleic acid encodes the light chain variable domain of the antibody defined in (11) and the isolated nucleic acid comprises SEQ ID NO: 106;
the isolated nucleic acid encodes the heavy chain variable domain of the antibody defined in (12) and the isolated nucleic acid comprises SEQ ID NO: 111 and/or the isolated nucleic acid encodes the light chain variable domain of the antibody defined in (12) and the isolated nucleic acid comprises SEQ ID NO: 116;
the isolated nucleic acid encodes the heavy chain variable domain of the antibody defined in (13) and the isolated nucleic acid comprises SEQ ID NO: 121 and/or the isolated nucleic acid encodes the light chain variable domain of the antibody defined in (13) and the isolated nucleic acid comprises SEQ ID NO: 126;
the isolated nucleic acid encodes the heavy chain variable domain of the antibody defined in (14) and the isolated nucleic acid comprises SEQ ID NO: 131 and/or the isolated nucleic acid encodes the light chain variable domain of the antibody defined in (14) and the isolated nucleic acid comprises SEQ ID NO: 136;
the isolated nucleic acid encodes the heavy chain variable domain of the antibody defined in (15) and the isolated nucleic acid comprises SEQ ID NO: 141 and/or the isolated nucleic acid encodes the light chain variable domain of the antibody defined in (15) and the isolated nucleic acid comprises SEQ ID NO: 146;
the isolated nucleic acid encodes the heavy chain variable domain of the antibody defined in (16) and the isolated nucleic acid comprises SEQ ID NO: 151 and/or the isolated nucleic acid encodes the light chain variable domain of the antibody defined in (16) and the isolated nucleic acid comprises SEQ ID NO: 156;
the isolated nucleic acid encodes the heavy chain variable domain of the antibody defined in (17) and the isolated nucleic acid comprises SEQ ID NO: 161 and/or the isolated nucleic acid encodes the light chain variable domain of the antibody defined in (17) and the isolated nucleic acid comprises SEQ ID NO: 166;
the isolated nucleic acid encodes the heavy chain variable domain of the antibody defined in (18) and the isolated nucleic acid comprises SEQ ID NO: 171 and/or the isolated nucleic acid encodes the light chain variable domain of the antibody defined in (18) and the isolated nucleic acid comprises SEQ ID NO: 176;
the isolated nucleic acid encodes the heavy chain variable domain of the antibody defined in (19) and the isolated nucleic acid comprises SEQ ID NO: 181 and/or the isolated nucleic acid encodes the light chain variable domain of the antibody defined in (19) and the isolated nucleic acid comprises SEQ ID NO: 186;
the isolated nucleic acid encodes the heavy chain variable domain of the antibody defined in (20) and the isolated nucleic acid comprises SEQ ID NO: 191 and/or the isolated nucleic acid encodes the light chain variable domain of the antibody defined in (20) and the isolated nucleic acid comprises SEQ ID NO: 196;
the isolated nucleic acid encodes the heavy chain variable domain of the antibody defined in (21) and the isolated nucleic acid comprises SEQ ID NO: 201 and/or the isolated nucleic acid encodes the light chain variable domain of the antibody defined in (21) and the isolated nucleic acid comprises SEQ ID NO: 206;
the isolated nucleic acid encodes the heavy chain variable domain of the antibody defined in (22) and the isolated nucleic acid comprises SEQ ID NO: 211 and/or the isolated nucleic acid encodes the light chain variable domain of the antibody defined in (22) and the isolated nucleic acid comprises SEQ ID NO: 216;
the isolated nucleic acid encodes the heavy chain variable domain of the antibody defined in (23) and the isolated nucleic acid comprises SEQ ID NO: 221 and/or the isolated nucleic acid encodes the light chain variable domain of the antibody defined in (23) and the isolated nucleic acid comprises SEQ ID NO: 226;
the isolated nucleic acid encodes the heavy chain variable domain of the antibody defined in (24) and the isolated nucleic acid comprises SEQ ID NO: 231 and/or the isolated nucleic acid encodes the light chain variable domain of the antibody defined in (24) and the isolated nucleic acid comprises SEQ ID NO: 236;
the isolated nucleic acid encodes the heavy chain variable domain of the antibody defined in (25) and the isolated nucleic acid comprises SEQ ID NO: 241 and/or the isolated nucleic acid encodes the light chain variable domain of the antibody defined in (25) and the isolated nucleic acid comprises SEQ ID NO: 246;
the isolated nucleic acid encodes the heavy chain variable domain of the antibody defined in (26) and the isolated nucleic acid comprises SEQ ID NO: 251 and/or the isolated nucleic acid encodes the light chain variable domain of the antibody defined in (26) and the isolated nucleic acid comprises SEQ ID NO: 256;
the isolated nucleic acid encodes the heavy chain variable domain of the antibody defined in (27) and the isolated nucleic acid comprises SEQ ID NO: 261 and/or the isolated nucleic acid encodes the light chain variable domain of the antibody defined in (27) and the isolated nucleic acid comprises SEQ ID NO: 266;
the isolated nucleic acid encodes the heavy chain variable domain of the antibody defined in (28) and the isolated nucleic acid comprises SEQ ID NO: 271 and/or the isolated nucleic acid encodes the light chain variable domain of the antibody defined in (28) and the isolated nucleic acid comprises SEQ ID NO: 276;
the isolated nucleic acid encodes the heavy chain variable domain of the antibody defined in (29) and the isolated nucleic acid comprises SEQ ID NO: 281 and/or the isolated nucleic acid encodes the light chain variable domain of the antibody defined in (29) and the isolated nucleic acid comprises SEQ ID NO: 286;
the isolated nucleic acid encodes the heavy chain variable domain of the antibody defined in (30) and the isolated nucleic acid comprises SEQ ID NO: 291 and/or the isolated nucleic acid encodes the light chain variable domain of the antibody defined in (30) and the isolated nucleic acid comprises SEQ ID NO: 296;
the isolated nucleic acid encodes the heavy chain variable domain of the antibody defined in (31) and the isolated nucleic acid comprises SEQ ID NO: 301 and/or the isolated nucleic acid encodes the light chain variable domain of the antibody defined in (31) and the isolated nucleic acid comprises SEQ ID NO: 306;
the isolated nucleic acid encodes the heavy chain variable domain of the antibody defined in (32) and the isolated nucleic acid comprises SEQ ID NO: 311 and/or the isolated nucleic acid encodes the light chain variable domain of the antibody defined in (32) and the isolated nucleic acid comprises SEQ ID NO: 316;
the isolated nucleic acid encodes the heavy chain variable domain of the antibody defined in (33) and the isolated nucleic acid comprises SEQ ID NO: 321 and/or the isolated nucleic acid encodes the light chain variable domain of the antibody defined in (33) and the isolated nucleic acid comprises SEQ ID NO: 326;
the isolated nucleic acid encodes the heavy chain variable domain of the antibody defined in (34) and the isolated nucleic acid comprises SEQ ID NO: 331 and/or the isolated nucleic acid encodes the light chain variable domain of the antibody defined in (34) and the isolated nucleic acid comprises SEQ ID NO: 336;
the isolated nucleic acid encodes the heavy chain variable domain of the antibody defined in (35) and the isolated nucleic acid comprises SEQ ID NO: 341 and/or the isolated nucleic acid encodes the light chain variable domain of the antibody defined in (35) and the isolated nucleic acid comprises SEQ ID NO: 346;
the isolated nucleic acid encodes the heavy chain variable domain of the antibody defined in (36) and the isolated nucleic acid comprises SEQ ID NO: 351 and/or the isolated nucleic acid encodes the light chain variable domain of the antibody defined in (36) and the isolated nucleic acid comprises SEQ ID NO: 356;
the isolated nucleic acid encodes the heavy chain variable domain of the antibody defined in (37) and the isolated nucleic acid comprises SEQ ID NO: 361 and/or the isolated nucleic acid encodes the light chain variable domain of the antibody defined in (37) and the isolated nucleic acid comprises SEQ ID NO: 366;
the isolated nucleic acid encodes the heavy chain variable domain of the antibody defined in (38) and the isolated nucleic acid comprises SEQ ID NO: 371 and/or the isolated nucleic acid encodes the light chain variable domain of the antibody defined in (38) and the isolated nucleic acid comprises SEQ ID NO: 376;
the isolated nucleic acid encodes the heavy chain variable domain of the antibody defined in (39) and the isolated nucleic acid comprises SEQ ID NO: 381 and/or the isolated nucleic acid encodes the light chain variable domain of the antibody defined in (39) and the isolated nucleic acid comprises SEQ ID NO: 386;
the isolated nucleic acid encodes the heavy chain variable domain of the antibody defined in (40) and the isolated nucleic acid comprises SEQ ID NO: 391 and/or the isolated nucleic acid encodes the light chain variable domain of the antibody defined in (40) and the isolated nucleic acid comprises SEQ ID NO: 396;
the isolated nucleic acid encodes the heavy chain variable domain of the antibody defined in (41) and the isolated nucleic acid comprises SEQ ID NO: 401 and/or the isolated nucleic acid encodes the light chain variable domain of the antibody defined in (41) and the isolated nucleic acid comprises SEQ ID NO: 406;
the isolated nucleic acid encodes the heavy chain variable domain of the antibody defined in (42) and the isolated nucleic acid comprises SEQ ID NO: 411 and/or the isolated nucleic acid encodes the light chain variable domain of the antibody defined in (42) and the isolated nucleic acid comprises SEQ ID NO: 416;
the isolated nucleic acid encodes the heavy chain variable domain of the antibody defined in (43) and the isolated nucleic acid comprises SEQ ID NO: 421 and/or the isolated nucleic acid encodes the light chain variable domain of the antibody defined in (43) and the isolated nucleic acid comprises SEQ ID NO: 426;
the isolated nucleic acid encodes the heavy chain variable domain of the antibody defined in (44) and the isolated nucleic acid comprises SEQ ID NO: 431 and/or the isolated nucleic acid encodes the light chain variable domain of the antibody defined in (44) and the isolated nucleic acid comprises SEQ ID NO: 436;
the isolated nucleic acid encodes the heavy chain variable domain of the antibody defined in (45) and the isolated nucleic acid comprises SEQ ID NO: 441 and/or the isolated nucleic acid encodes the light chain variable domain of the antibody defined in (45) and the isolated nucleic acid comprises SEQ ID NO: 446;
the isolated nucleic acid encodes the heavy chain variable domain of the antibody defined in (46) and the isolated nucleic acid comprises SEQ ID NO: 451 and/or the isolated nucleic acid encodes the light chain variable domain of the antibody defined in (46) and the isolated nucleic acid comprises SEQ ID NO: 456;
the isolated nucleic acid encodes the heavy chain variable domain of the antibody defined in (47) and the isolated nucleic acid comprises SEQ ID NO: 461 and/or the isolated nucleic acid encodes the light chain variable domain of the antibody defined in (47) and the isolated nucleic acid comprises SEQ ID NO: 466;
the isolated nucleic acid encodes the heavy chain variable domain of the antibody defined in (48) and the isolated nucleic acid comprises SEQ ID NO: 471 and/or the isolated nucleic acid encodes the light chain variable domain of the antibody defined in (48) and the isolated nucleic acid comprises SEQ ID NO: 476;
the isolated nucleic acid encodes the heavy chain variable domain of the antibody defined in (49) and the isolated nucleic acid comprises SEQ ID NO: 481 and/or the isolated nucleic acid encodes the light chain variable domain of the antibody defined in (49) and the isolated nucleic acid comprises SEQ ID NO: 486;
the isolated nucleic acid encodes the heavy chain variable domain of the antibody defined in (50) and the isolated nucleic acid comprises SEQ ID NO: 491 and/or the isolated nucleic acid encodes the light chain variable domain of the antibody defined in (50) and the isolated nucleic acid comprises SEQ ID NO: 496;
the isolated nucleic acid encodes the heavy chain variable domain of the antibody defined in (51) and the isolated nucleic acid comprises SEQ ID NO: 501 and/or the isolated nucleic acid encodes the light chain variable domain of the antibody defined in (51) and the isolated nucleic acid comprises SEQ ID NO: 506;
the isolated nucleic acid encodes the heavy chain variable domain of the antibody defined in (52) and the isolated nucleic acid comprises SEQ ID NO: 511 and/or the isolated nucleic acid encodes the light chain variable domain of the antibody defined in (52) and the isolated nucleic acid comprises SEQ ID NO: 516;
the isolated nucleic acid encodes the heavy chain variable domain of the antibody defined in (53) and the isolated nucleic acid comprises SEQ ID NO: 521 and/or the isolated nucleic acid encodes the light chain variable domain of the antibody defined in (53) and the isolated nucleic acid comprises SEQ ID NO: 526;
the isolated nucleic acid encodes the heavy chain variable domain of the antibody defined in (54) and the isolated nucleic acid comprises SEQ ID NO: 531 and/or the isolated nucleic acid encodes the light chain variable domain of the antibody defined in (54) and the isolated nucleic acid comprises SEQ ID NO: 536;
the isolated nucleic acid encodes the heavy chain variable domain of the antibody defined in (55) and the isolated nucleic acid comprises SEQ ID NO: 541 and/or the isolated nucleic acid encodes the light chain variable domain of the antibody defined in (55) and the isolated nucleic acid comprises SEQ ID NO: 546;
the isolated nucleic acid encodes the heavy chain variable domain of the antibody defined in (56) and the isolated nucleic acid comprises SEQ ID NO: 551 and/or the isolated nucleic acid encodes the light chain variable domain of the antibody defined in (56) and the isolated nucleic acid comprises SEQ ID NO: 556;
the isolated nucleic acid encodes the heavy chain variable domain of the antibody defined in (57) and the isolated nucleic acid comprises SEQ ID NO: 561 and/or the isolated nucleic acid encodes the light chain variable domain of the antibody defined in (57) and the isolated nucleic acid comprises SEQ ID NO: 566;
the isolated nucleic acid encodes the heavy chain variable domain of the antibody defined in (58) and the isolated nucleic acid comprises SEQ ID NO: 571 and/or the isolated nucleic acid encodes the light chain variable domain of the antibody defined in (58) and the isolated nucleic acid comprises SEQ ID NO: 576;
the isolated nucleic acid encodes the heavy chain variable domain of the antibody defined in (59) and the isolated nucleic acid comprises SEQ ID NO: 581 and/or the isolated nucleic acid encodes the light chain variable domain of the antibody defined in (59) and the isolated nucleic acid comprises SEQ ID NO: 586;
the isolated nucleic acid encodes the heavy chain variable domain of the antibody defined in (60) and the isolated nucleic acid comprises SEQ ID NO: 591 and/or the isolated nucleic acid encodes the light chain variable domain of the antibody defined in (60) and the isolated nucleic acid comprises SEQ ID NO: 596;
the isolated nucleic acid encodes the heavy chain variable domain of the antibody defined in (61) and the isolated nucleic acid comprises SEQ ID NO: 601 and/or the isolated nucleic acid encodes the light chain variable domain of the antibody defined in (61) and the isolated nucleic acid comprises SEQ ID NO: 606;
the isolated nucleic acid encodes the heavy chain variable domain of the antibody defined in (62) and the isolated nucleic acid comprises SEQ ID NO: 611 and/or the isolated nucleic acid encodes the light chain variable domain of the antibody defined in (62) and the isolated nucleic acid comprises SEQ ID NO: 616;
the isolated nucleic acid encodes the heavy chain variable domain of the antibody defined in (63) and the isolated nucleic acid comprises SEQ ID NO: 621 and/or the isolated nucleic acid encodes the light chain variable domain of the antibody defined in (63) and the isolated nucleic acid comprises SEQ ID NO: 626;
the isolated nucleic acid encodes the heavy chain variable domain of the antibody defined in (64) and the isolated nucleic acid comprises SEQ ID NO: 631 and/or the isolated nucleic acid encodes the light chain variable domain of the antibody defined in (64) and the isolated nucleic acid comprises SEQ ID NO: 636;
the isolated nucleic acid encodes the heavy chain variable domain of the antibody defined in (65) and the isolated nucleic acid comprises SEQ ID NO: 641 and/or the isolated nucleic acid encodes the light chain variable domain of the antibody defined in (65) and the isolated nucleic acid comprises SEQ ID NO: 646;
the isolated nucleic acid encodes the heavy chain variable domain of the antibody defined in (66) and the isolated nucleic acid comprises SEQ ID NO: 651 and/or the isolated nucleic acid encodes the light chain variable domain of the antibody defined in (66) and the isolated nucleic acid comprises SEQ ID NO: 656;
the isolated nucleic acid encodes the heavy chain variable domain of the antibody defined in (67) and the isolated nucleic acid comprises SEQ ID NO: 661 and/or the isolated nucleic acid encodes the light chain variable domain of the antibody defined in (67) and the isolated nucleic acid comprises SEQ ID NO: 666;
the isolated nucleic acid encodes the heavy chain variable domain of the antibody defined in (68) and the isolated nucleic acid comprises SEQ ID NO: 671 and/or the isolated nucleic acid encodes the light chain variable domain of the antibody defined in (68) and the isolated nucleic acid comprises SEQ ID NO: 676;
the isolated nucleic acid encodes the heavy chain variable domain of the antibody defined in (69) and the isolated nucleic acid comprises SEQ ID NO: 681 and/or the isolated nucleic acid encodes the light chain variable domain of the antibody defined in (69) and the isolated nucleic acid comprises SEQ ID NO: 686;
the isolated nucleic acid encodes the heavy chain variable domain of the antibody defined in (70) and the isolated nucleic acid comprises SEQ ID NO: 691 and/or the isolated nucleic acid encodes the light chain variable domain of the antibody defined in (70) and the isolated nucleic acid comprises SEQ ID NO: 696;
the isolated nucleic acid encodes the heavy chain variable domain of the antibody defined in (71) and the isolated nucleic acid comprises SEQ ID NO: 701 and/or the isolated nucleic acid encodes the light chain variable domain of the antibody defined in (71) and the isolated nucleic acid comprises SEQ ID NO: 706;
the isolated nucleic acid encodes the heavy chain variable domain of the antibody defined in (72) and the isolated nucleic acid comprises SEQ ID NO: 711 and/or the isolated nucleic acid encodes the light chain variable domain of the antibody defined in (72) and the isolated nucleic acid comprises SEQ ID NO: 716;
the isolated nucleic acid encodes the heavy chain variable domain of the antibody defined in (73) and the isolated nucleic acid comprises SEQ ID NO: 721 and/or the isolated nucleic acid encodes the light chain variable domain of the antibody defined in (73) and the isolated nucleic acid comprises SEQ ID NO: 726;
the isolated nucleic acid encodes the heavy chain variable domain of the antibody defined in (74) and the isolated nucleic acid comprises SEQ ID NO: 731 and/or the isolated nucleic acid encodes the light chain variable domain of the antibody defined in (74) and the isolated nucleic acid comprises SEQ ID NO: 736;
the isolated nucleic acid encodes the heavy chain variable domain of the antibody defined in (75) and the isolated nucleic acid comprises SEQ ID NO: 741 and/or the isolated nucleic acid encodes the light chain variable domain of the antibody defined in (75) and the isolated nucleic acid comprises SEQ ID NO: 746;
the isolated nucleic acid encodes the heavy chain variable domain of the antibody defined in (76) and the isolated nucleic acid comprises SEQ ID NO: 751 and/or the isolated nucleic acid encodes the light chain variable domain of the antibody defined in (76) and the isolated nucleic acid comprises SEQ ID NO: 756;
the isolated nucleic acid encodes the heavy chain variable domain of the antibody defined in (77) and the isolated nucleic acid comprises SEQ ID NO: 761 and/or the isolated nucleic acid encodes the light chain variable domain of the antibody defined in (77) and the isolated nucleic acid comprises SEQ ID NO: 766;
the isolated nucleic acid encodes the heavy chain variable domain of the antibody defined in (78) and the isolated nucleic acid comprises SEQ ID NO: 771 and/or the isolated nucleic acid encodes the light chain variable domain of the antibody defined in (78) and the isolated nucleic acid comprises SEQ ID NO: 776;
the isolated nucleic acid encodes the heavy chain variable domain of the antibody defined in (79) and the isolated nucleic acid comprises SEQ ID NO: 781 and/or the isolated nucleic acid encodes the light chain variable domain of the antibody defined in (79) and the isolated nucleic acid comprises SEQ ID NO: 786;
the isolated nucleic acid encodes the heavy chain variable domain of the antibody defined in (80) and the isolated nucleic acid comprises SEQ ID NO: 791 and/or the isolated nucleic acid encodes the light chain variable domain of the antibody defined in (80) and the isolated nucleic acid comprises SEQ ID NO: 796;
the isolated nucleic acid encodes the heavy chain variable domain of the antibody defined in (81) and the isolated nucleic acid comprises SEQ ID NO: 801 and/or the isolated nucleic acid encodes the light chain variable domain of the antibody defined in (81) and the isolated nucleic acid comprises SEQ ID NO: 806;
the isolated nucleic acid encodes the heavy chain variable domain of the antibody defined in (82) and the isolated nucleic acid comprises SEQ ID NO: 811 and/or the isolated nucleic acid encodes the light chain variable domain of the antibody defined in (82) and the isolated nucleic acid comprises SEQ ID NO: 816;
the isolated nucleic acid encodes the heavy chain variable domain of the antibody defined in (83) and the isolated nucleic acid comprises SEQ ID NO: 821 and/or the isolated nucleic acid encodes the light chain variable domain of the antibody defined in (83) and the isolated nucleic acid comprises SEQ ID NO: 826;
the isolated nucleic acid encodes the heavy chain variable domain of the antibody defined in (84) and the isolated nucleic acid comprises SEQ ID NO: 831 and/or the isolated nucleic acid encodes the light chain variable domain of the antibody defined in (84) and the isolated nucleic acid comprises SEQ ID NO: 836;
the isolated nucleic acid encodes the heavy chain variable domain of the antibody defined in (85) and the isolated nucleic acid comprises SEQ ID NO: 841 and/or the isolated nucleic acid encodes the light chain variable domain of the antibody defined in (85) and the isolated nucleic acid comprises SEQ ID NO: 846;
the isolated nucleic acid encodes the heavy chain variable domain of the antibody defined in (86) and the isolated nucleic acid comprises SEQ ID NO: 851 and/or the isolated nucleic acid encodes the light chain variable domain of the antibody defined in (86) and the isolated nucleic acid comprises SEQ ID NO: 856;
the isolated nucleic acid encodes the heavy chain variable domain of the antibody defined in (87) and the isolated nucleic acid comprises SEQ ID NO: 861 and/or the isolated nucleic acid encodes the light chain variable domain of the antibody defined in (87) and the isolated nucleic acid comprises SEQ ID NO: 866;
the isolated nucleic acid encodes the heavy chain variable domain of the antibody defined in (88) and the isolated nucleic acid comprises SEQ ID NO: 871 and/or the isolated nucleic acid encodes the light chain variable domain of the antibody defined in (88) and the isolated nucleic acid comprises SEQ ID NO: 876;
the isolated nucleic acid encodes the heavy chain variable domain of the antibody defined in (89) and the isolated nucleic acid comprises SEQ ID NO: 881 and/or the isolated nucleic acid encodes the light chain variable domain of the antibody defined in (89) and the isolated nucleic acid comprises SEQ ID NO: 886;
the isolated nucleic acid encodes the heavy chain variable domain of the antibody defined in (90) and the isolated nucleic acid comprises SEQ ID NO: 891 and/or the isolated nucleic acid encodes the light chain variable domain of the antibody defined in (90) and the isolated nucleic acid comprises SEQ ID NO: 896;
the isolated nucleic acid encodes the heavy chain variable domain of the antibody defined in (91) and the isolated nucleic acid comprises SEQ ID NO: 901 and/or the isolated nucleic acid encodes the light chain variable domain of the antibody defined in (91) and the isolated nucleic acid comprises SEQ ID NO: 906;
the isolated nucleic acid encodes the heavy chain variable domain of the antibody defined in (92) and the isolated nucleic acid comprises SEQ ID NO: 911 and/or the isolated nucleic acid encodes the light chain variable domain of the antibody defined in (92) and the isolated nucleic acid comprises SEQ ID NO: 916;
the isolated nucleic acid encodes the heavy chain variable domain of the antibody defined in (93) and the isolated nucleic acid comprises SEQ ID NO: 921 and/or the isolated nucleic acid encodes the light chain variable domain of the antibody defined in (93) and the isolated nucleic acid comprises SEQ ID NO: 926;
the isolated nucleic acid encodes the heavy chain variable domain of the antibody defined in (94) and the isolated nucleic acid comprises SEQ ID NO: 931 and/or the isolated nucleic acid encodes the light chain variable domain of the antibody defined in (94) and the isolated nucleic acid comprises SEQ ID NO: 936;
the isolated nucleic acid encodes the heavy chain variable domain of the antibody defined in (95) and the isolated nucleic acid comprises SEQ ID NO: 941 and/or the isolated nucleic acid encodes the light chain variable domain of the antibody defined in (95) and the isolated nucleic acid comprises SEQ ID NO: 946;
the isolated nucleic acid encodes the heavy chain variable domain of the antibody defined in (96) and the isolated nucleic acid comprises SEQ ID NO: 951 and/or the isolated nucleic acid encodes the light chain variable domain of the antibody defined in (96) and the isolated nucleic acid comprises SEQ ID NO: 956;
the isolated nucleic acid encodes the heavy chain variable domain of the antibody defined in (97) and the isolated nucleic acid comprises SEQ ID NO: 961 and/or the isolated nucleic acid encodes the light chain variable domain of the antibody defined in (97) and the isolated nucleic acid comprises SEQ ID NO: 966;
the isolated nucleic acid encodes the heavy chain variable domain of the antibody defined in (98) and the isolated nucleic acid comprises SEQ ID NO: 971 and/or the isolated nucleic acid encodes the light chain variable domain of the antibody defined in (98) and the isolated nucleic acid comprises SEQ ID NO: 976; and/or
the isolated nucleic acid encodes the heavy chain variable domain of the antibody defined in (99) and the isolated nucleic acid comprises SEQ ID NO: 981 and/or the isolated nucleic acid encodes the light chain variable domain of the antibody defined in (99) and the isolated nucleic acid comprises SEQ ID NO: 986.

26. A recombinant expression vector comprising the nucleic acid of claim 24.

27. An isolated host cell comprising the recombinant expression vector of claim 26.

28. A method of preventing or treating a coronavirus infection, comprising administering to a subject one or more of the antibodies, or antigen-binding fragments thereof, of claim 1 in an amount effective to treat, prevent, or diagnose the coronavirus infection.

29. The method of claim 28, wherein the subject is a human.

30. The method of claim 28, wherein at least two of the antibodies or antigen-binding fragments thereof are administered to the subject or wherein the at least two antibodies or antigen-binding fragments thereof comprise an anti-RBD antibody or antigen binding-fragment thereof and an anti-NTD antibody or antigen binding fragment thereof.

31. (canceled)

32. The method of claim 30, wherein the anti-RBD antibody or binding-fragment thereof comprises:
a heavy chain variable domain comprising a CDR1 comprising the amino acid sequence of SEQ ID NO:233, a CDR2 comprising the amino acid sequence of SEQ ID NO:234, and a CDR3 comprising the amino acid sequence of SEQ ID NO:235 and a light chain variable domain comprising a CDR1 comprising the amino acid sequence of SEQ ID NO:238, a CDR2 comprising the amino acid sequence of SEQ ID NO:239, and a CDR3 comprising the amino acid sequence of SEQ ID NO:240 or
wherein the anti-RBD antibody or binding-fragment thereof comprises a heavy chain variable domain comprising a CDR1 comprising the amino acid sequence of SEQ ID NO:243, a CDR2 comprising the amino acid sequence of SEQ ID NO:244, and a CDR3 comprising the amino acid sequence of SEQ ID NO:245 and a light chain variable domain comprising a CDR1 comprising the amino acid sequence of SEQ ID NO:248, a CDR2 comprising the amino acid sequence of SEQ ID NO:249, and a CDR3 comprising the amino acid sequence of SEQ ID NO:250 and
wherein the anti-NTD antibody or antigen-binding fragment thereof comprises a heavy chain variable domain comprising a CDR1 comprising the amino acid sequence of SEQ ID NO:152, a CDR2 comprising the amino acid sequence of SEQ ID NO:153, and a CDR3 comprising the amino acid sequence of SEQ ID NO:154 and a light chain variable domain comprising a CDR1 comprising the amino acid sequence of SEQ ID NO:158, a CDR2 comprising the amino acid sequence of SEQ ID NO:159, and a CDR3 comprising the amino acid sequence of SEQ ID NO:160.

33. The method of claim 30, wherein the at least two antibodies comprise COV_2173 and COV_2039.

34. (canceled)

35. A method of diagnosing a coronavirus infection comprising the steps of:
contacting a sample from a subject suspected of having a coronavirus infection with one or more antibodies, or antigen-binding fragment thereof, of claim 1; and
determining the presence of the coronavirus infection upon detection of antibody binding, optionally wherein the coronavirus infection is a SARS-CoV-2 virus infection and optionally wherein the one or more antibodies, or antigen-binding fragment thereof.
